United States Patent Application Publication US 2021/0170017 A1 - sequence listing, part 14

SEQ ID NO: 19642 - RNA, 1997 nt, Artificial Sequence
  mRNA product Design d-5 comprising derived and/or modified sequence from HRSV(Memphis-37)__AIY60640.1__F-del_DSCav1_mut8 (opt6)
gggagagggcgcuuggcuugcaaggacccugagcugcggcauugaagcacacccaacccaacucgacugaagucagccucacugaaccggaucugagaaucuucucucucugggcuugccagggcucuccgaaccuagcuagcauccucuucaauuccaacuagaaagcuuaccauggaacuacccauacuaaaaacaaacgcaauuacaacaauacuugccgcaguaaccuuaugcuuugccucaucccaaaacauaacagaagaauuuuaucaaucaacaugcuccgcaguaucaaaaggauaccuaggcgcucuaagaacaggaugguacacauccguaaucacaauagaacuauccaauauaaaagaaauaaaauguaauggaacagaugcaaaaguuaaauuaauaaaacaagaacuagacaaauacaaaaacgcaguuaccgaucuccaacuauuaaugcaaucaacaccagcugcaggaaguggaagcgccauagcaagcggaauagcagucugcaaaguauuacaucuugaaggcgaaguaaacaaaaucaaaaaugcccuccucucaacaaacaaagcuguaguaucccuaucaggaugcgguguaucuguucuuacauuuaaaguacucgaucuaaaaaacuacaucgauaaacaguuacuuccaauacucaacaaacaaucauguagcauaccaaacauagaaacaguaauagaauuucaacaaaaaaacaaucgacuacucgaaauaacuagagaauuuucuguaaacgcuggaguaaccacaccagugucuaccuauaugcuuacaaauagcgaacuccuaucacuaaucaaugacaugccaauaacaaaugaccagaaaaaacucaugucaaauaacguacaaauaguacgacaacaaagcuacuccauaaugugcauaaucaaagaagaaguauuagccuacguuguucaacuaccauuauauggaguuauagacacuccaugcuggaaauuacauacaagcccacucuguacaacaaacacaaaagaaggcucaaacauaugcuuaacaagaacagauagaggaugguacugcgauaacgcaggcucagucucauuuuuuccacaagccgaaaccugcaaaguacaaucaaauagaguuuuuugcgacacaaugaacucacucacucuaccaagugaaguaaaucucuguaauaucgacauauucaacccaaaauaugacugcaaaauaaugacaucuaaaaccgauguauccucaagcguaaucacaucauuaggagcuauaguuuccugcuacgguaaaacaaaaugcacagcauccaacaaaugucgcgguaucaucaaaacauucuccaacggaugugauuacguaucaaacaaaggugucgacaccguaagcguaggcaacacuuuauacuauguaaacaaacaagaaggacaaagucuauauguaaaaggagaaccaauaauaaacuucuaugacccccuaguauucccuuccgacgaauuugaugcaagcauuucacaaguuaacgaaaaaaucaaucaaucccuugcuuucauaagaaaaucagacgaauuacuacacaacguaaacguaggaaaaagcacaacaaauaucaugauuacaacaauaauaauuguaauaauaguaauacuccucuuacuuauagcagucggcuuauuccuuuacugcaaagcaagauaaggacuaguggaagcauuuuccuggcugauuaaaagaaauuacucagcuauggucaucuguuccuguuagaaggcuaugcagcauauuauauacuaugcgcauguuaugaaaugcauaauaaaaaauuuuaaaaaaucuaaaagaucuaaaaaaaaaaaaaaaaaaaaaaaaaaaaaaaaaaaaaaaaaaaaaaaaaaaaaaaaaaaaaaaaugcaucccccccccccccccccccccccccccccccaaaggcucuuuucagagccaccagaauu

SEQ ID NO: 19643 - RNA, 1997 nt, Artificial Sequence
  mRNA product Design d-5 comprising derived and/or modified sequence from HRSV(Memphis-37)__AIY60640.1__F-del_DSCav1_mut8 (opt11)
gggagagggcgcuuggcuugcaaggacccugagcugcggcauugaagcacacccaacccaacucgacugaagucagccucacugaaccggaucugagaaucuucucucucugggcuugccagggcucuccgaaccuagcuagcauccucuucaauuccaacuagaaagcuuaccauggaacuccccauccuaaaaaccaacgcaaucaccaccauccucgccgccguaacacucugcuuugcaagcucccaaaacaucaccgaagaauuuuaccaaucuaccugcagcgccguaucuaaaggauaccuaggagcccucagaaccgguugguacaccucugucaucacaauagaacucuccaacaucaaagaaaucaaaugcaacggcaccgacgccaaagucaaacucaucaaacaagaacucgacaaauauaaaaacgccguaaccgaccuccaacuccucaugcaauccacccccgccgccggcaguggcuccgcuaucgccuccggaaucgccguuugcaaaguccugcaccuagaaggcgaagucaacaaaaucaaaaacgcccugcucucaaccaacaaagcugucguaagccucuccggcugcggagucuccguccuuaccuucaaaguacucgaccuuaaaaacuacaucgacaaacaacuucuccccauacucaauaaacaauccugcuccauacccaacaucgaaacagucaucgaguuccaacagaaaaauaaccgccuccucgaaauaacccgcgaguucuccgucaacgcaggcgucaccaccccagucuccaccuacaugcugacaaacuccgaacuccuaucccucaucaacgacaugcccaucaccaacgaccaaaagaaacucaugagcaauaacguccaaaucguacgacaacaauccuacagcaucauguguaucaucaaagaagaaguacucgccuacgucguccaacucccacuauacggcgucaucgacacaccaugcuggaaacuucacaccuccccacucugcaccacaaacacaaaagaaggcuccaacaucugccuuacccgaaccgaccgcgggugguacugcgacaacgccggaucagucucguucuuuccccaagccgaaaccugcaaaguacaaucaaaucgcgucuucugcgacaccaugaacuccuuaacacuaccauccgaaguaaaccucugcaacauagacaucuucaacccaaaauacgacugcaaaaucaugaccuccaaaaccgacguauccuccuccguaaucaccagccucggcgcaauagucucaugcuacggcaaaaccaaaugcaccgccuccaacaaaugccgcggcaucauaaaaacuuucucuaacggaugcgacuacgucagcaacaaaggcgucgacaccguauccguagguaauacacuuuacuacgucaauaaacaagaaggccaaucccucuacgucaaaggagaacccaucauaaacuucuacgacccccucgucuuccccuccgacgaguucgacgccuccaucagccaggucaacgaaaagaucaaccaaucacucgccuucauccgcaaaagcgacgaacuccuccacaacguaaacgucggcaaauccacaaccaacauaaugaucaccacuaucaucaucgugauaaucgucauuuuacuucuccucaucgccguaggccucuuccuauacugcaaagcccgcuaaggacuaguggaagcauuuuccuggcugauuaaaagaaauuacucagcuauggucaucuguuccuguuagaaggcuaugcagcauauuauauacuaugcgcauguuaugaaaugcauaauaaaaaauuuuaaaaaaucuaaaagaucuaaaaaaaaaaaaaaaaaaaaaaaaaaaaaaaaaaaaaaaaaaaaaaaaaaaaaaaaaaaaaaaaugcaucccccccccccccccccccccccccccccccaaaggcucuuuucagagccaccagaauu

SEQ ID NO: 19644 - RNA, 1877 nt, Artificial Sequence
  mRNA product Design e-1 comprising derived and/or modified sequence from HRSV(Memphis-37)__AIY60640.1__F-del_DSCav1_mut8 (opt1)
gggagaauauaagcguuggcggagcgucgguuguagcacucugcgcgcccgcucuucugcugcuguuugucuacuuccuccugcuuccccgccgccgccgccgccaucaagcuuaccauggagcugcccauccucaagaccaacgccaucaccacgauccuggccgcggugacccugugcuucgccagcucccagaacaucaccgaggaguucuaccagagcacgugcuccgccgucagcaagggcuaccucggcgcccugcgcaccgggugguacaccagcgugaucaccaucgagcuguccaacaucaaggagaucaagugcaacggcaccgacgccaaggugaagcucaucaagcaggagcuggacaaguacaagaacgcggucacggaccugcagcuccugaugcagagcaccccggccgccggcuccgggagcgcgaucgccuccggcaucgccgucugcaaggugcugcaccucgagggcgaggugaacaagaucaagaacgcccugcuguccaccaacaaggccgucgugagccucuccggcugcggggugagcguccugaccuucaaggugcuggaccucaagaacuacaucgacaagcagcugcugcccauccugaacaagcagagcugcuccauccccaacaucgagaccgucaucgaguuccagcagaagaacaaccgccuccuggagaucacgcgggaguucagcgugaacgcgggcgugaccacccccgucuccaccuacaugcugacgaacagcgagcuccugucccugaucaacgacaugccgaucaccaacgaccagaagaagcucaugagcaacaacgugcagaucgugcgccagcaguccuacagcaucaugugcaucaucaaggaggagguccuggccuacguggugcagcugccccucuacggggucaucgacacccccugcuggaagcugcacaccagcccccugugcacgaccaacaccaaggagggcuccaacaucugccucacccggacggaccgcgggugguacugcgacaacgccggcagcguguccuucuucccgcaggccgagaccugcaagguccagagcaaccggguguucugcgacaccaugaacucccugacccugcccagcgaggugaaccucugcaacaucgacaucuucaaccccaaguacgacugcaagaucaugacguccaagaccgacgucagcuccagcgugaucaccucccugggcgccaucgugagcugcuacgggaagaccaagugcacggcgagcaacaagugccgcggcaucaucaagaccuucuccaacgggugcgacuacgucagcaacaagggcguggacaccguguccgucggcaacacccuguacuacgugaacaagcaggagggccagagccucuacgugaagggggagcccaucaucaacuucuacgacccgcuggucuuccccuccgacgaguucgacgccagcaucucccaggugaacgagaagaucaaccagagccuggccuucauccggaaguccgacgagcuccugcacaacgugaacgucggcaagagcaccacgaacaucaugaucaccaccaucaucaucgugaucaucgugauccugcugcuccugaucgccgucgggcuguuccucuacugcaaggcccgcugaggacuaguguccaccugucccuccugggcugcuggauugucucguuuuccugccaaauaaacaggaucagcgcuuuacagaucuaaaaaaaaaaaaaaaaaaaaaaaaaaaaaaaaaaaaaaaaaaaaaaaaaaaaaaaaaaaaaaaaugcaucccccccccccccccccccccccccccccccaaaggcucuuuucagagccaccagaauu

SEQ ID NO: 19645 - RNA, 1877 nt, Artificial Sequence
  mRNA product Design e-1 comprising derived and/or modified sequence from HRSV(Memphis-37)__AIY60640.1__F-del_DSCav1_mut8 (opt1)
gggagaauauaagcguuggcggagcgucgguuguagcacucugcgcgcccgcucuucugcugcuguuugucuacuuccuccugcuuccccgccgccgccgccgccaucaagcuuaccauggagcugcccauccucaagaccaacgccaucaccacgauccuggccgcggugacccugugcuucgccagcucccagaacaucaccgaggaguucuaccagagcacgugcuccgccgucagcaagggcuaccucggggcccugcgcaccggcugguacaccuccgugaucaccaucgagcugagcaacaucaaggagaucaagugcaacgggaccgacgccaaggugaagcucaucaagcaggagcuggacaaguacaagaacgcggucacggaccugcagcuccugaugcaguccaccccggccgccggcagcggguccgccaucgcgagcggcaucgccgugugcaaggugcugcaccucgagggcgaggucaacaagaucaagaacgcccugcuguccaccaacaaggccguggugagccucuccgggugcggcgucagcgugcugaccuucaaggugcuggaccucaagaacuacaucgacaagcagcugcugcccauccucaacaagcaguccugcagcauccccaacaucgagacggucaucgaguuccagcagaagaacaaccggcugcuggagaucacccgcgaguucuccgugaacgccggggugaccacccccgucagcacguacaugcucaccaacuccgagcugcugagccucaucaacgacaugccgaucaccaacgaccagaagaagcugaugagcaacaacgugcagaucgugcggcagcaguccuacagcaucaugugcaucaucaaggaggagguccuggcguacguggugcagcucccccuguacggcgucaucgacacccccugcuggaagcugcacacgagcccccucugcaccaccaacaccaaggagggguccaacaucugccugacgcgcaccgaccggggcugguacugcgacaacgccggcuccgugagcuucuucccgcaggccgagaccugcaaggugcaguccaaccgcgucuucugcgacaccaugaacagccugacgcuccccuccgaggugaaccugugcaacaucgacaucuucaaccccaaguacgacugcaagaucaugaccagcaagaccgacgucuccagcuccgugaucaccagccugggggccaucguguccugcuacggcaagacgaagugcaccgccagcaacaagugccgggggaucaucaagaccuucuccaacggcugcgacuacgucagcaacaagggcguggacaccguguccgucgggaacacgcucuacuacgugaacaagcaggagggccagagccuguacgugaagggggagcccaucaucaacuucuacgacccgcuggucuuccccagcgacgaguucgacgcguccaucagccaggugaacgagaagaucaaccagucccucgccuucauccgcaagagcgacgagcugcugcacaacgugaacgucggcaaguccaccaccaacaucaugaucaccaccaucaucaucgugaucaucgugauccuccugcugcucaucgccgucgggcuguuccuguacugcaaggcccggugaggacuaguguccaccugucccuccugggcugcuggauugucucguuuuccugccaaauaaacaggaucagcgcuuuacagaucuaaaaaaaaaaaaaaaaaaaaaaaaaaaaaaaaaaaaaaaaaaaaaaaaaaaaaaaaaaaaaaaaugcaucccccccccccccccccccccccccccccccaaaggcucuuuucagagccaccagaauu

SEQ ID NO: 19646 - RNA, 1877 nt, Artificial Sequence
  mRNA product Design e-1 comprising derived and/or modified sequence from HRSV(Memphis-37)__AIY60640.1__F-del_DSCav1_mut8 (opt2)
gggagaauauaagcguuggcggagcgucgguuguagcacucugcgcgcccgcucuucugcugcuguuugucuacuuccuccugcuuccccgccgccgccgccgccaucaagcuuaccauggagcuccccauccucaagaccaacgccaucaccaccauccucgccgccgucacccucugcuucgccuccucccagaacaucaccgaggaguucuaccaguccaccugcuccgccgucuccaagggcuaccucggcgcccuccgcaccggcugguacaccuccgucaucaccaucgagcucuccaacaucaaggagaucaagugcaacggcaccgacgccaaggucaagcucaucaagcaggagcucgacaaguacaagaacgccgucaccgaccuccagcuccucaugcaguccacccccgccgccggcuccggcuccgccaucgccuccggcaucgccgucugcaagguccuccaccucgagggcgaggucaacaagaucaagaacgcccuccucuccaccaacaaggccgucgucucccucuccggcugcggcgucuccguccucaccuucaagguccucgaccucaagaacuacaucgacaagcagcuccuccccauccucaacaagcaguccugcuccauccccaacaucgagaccgucaucgaguuccagcagaagaacaaccgccuccucgagaucacccgcgaguucuccgucaacgccggcgucaccacccccgucuccaccuacaugcucaccaacuccgagcuccucucccucaucaacgacaugcccaucaccaacgaccagaagaagcucauguccaacaacguccagaucguccgccagcaguccuacuccaucaugugcaucaucaaggaggagguccucgccuacgucguccagcucccccucuacggcgucaucgacacccccugcuggaagcuccacaccuccccccucugcaccaccaacaccaaggagggcuccaacaucugccucacccgcaccgaccgcggcugguacugcgacaacgccggcuccgucuccuucuucccccaggccgagaccugcaagguccaguccaaccgcgucuucugcgacaccaugaacucccucacccuccccuccgaggucaaccucugcaacaucgacaucuucaaccccaaguacgacugcaagaucaugaccuccaagaccgacgucuccuccuccgucaucaccucccucggcgccaucgucuccugcuacggcaagaccaagugcaccgccuccaacaagugccgcggcaucaucaagaccuucuccaacggcugcgacuacgucuccaacaagggcgucgacaccgucuccgucggcaacacccucuacuacgucaacaagcaggagggccagucccucuacgucaagggcgagcccaucaucaacuucuacgacccccucgucuuccccuccgacgaguucgacgccuccaucucccaggucaacgagaagaucaaccagucccucgccuucauccgcaaguccgacgagcuccuccacaacgucaacgucggcaaguccaccaccaacaucaugaucaccaccaucaucaucgucaucaucgucauccuccuccuccucaucgccgucggccucuuccucuacugcaaggcccgcugaggacuaguguccaccugucccuccugggcugcuggauugucucguuuuccugccaaauaaacaggaucagcgcuuuacagaucuaaaaaaaaaaaaaaaaaaaaaaaaaaaaaaaaaaaaaaaaaaaaaaaaaaaaaaaaaaaaaaaaugcaucccccccccccccccccccccccccccccccaaaggcucuuuucagagccaccagaauu

SEQ ID NO: 19647 - RNA, 1877 nt, Artificial Sequence
  mRNA product Design e-1 comprising derived and/or modified sequence from HRSV(Memphis-37)__AIY60640.1__F-del_DSCav1_mut8 (opt3)
gggagaauauaagcguuggcggagcgucgguuguagcacucugcgcgcccgcucuucugcugcuguuugucuacuuccuccugcuuccccgccgccgccgccgccaucaagcuuaccauggagcugcccauccucaagaccaacgccauuacaacuauacuugcugcagugacgcugugcuucgccagcucccagaauaucaccgaagaguuuuaccaaucuacauguucagcggucaguaaaggcuauuugggggcuuuaagaacuggaugguacaccagcguuauuacaaucgaacuguccaacauuaaggagaucaaaugcaaugguaccgacgccaaggugaaacuaauaaagcaggaacucgauaaguauaaaaacgcaguaacugaccugcagcuucugaugcagucuacuccugccgcuggcucggggucagcaaucgccagcggaauugcuguguguaaggucuugcaccucgagggcgaggugaauaaaaucaagaacgcccugcugaguaccaauaaagcgguugugucccucucugguugcggggucagcguguuaacguucaagguacuggaucuuaagaacuacauugacaaacaauugcugccaauccuaaauaagcaguccuguucaauaccgaacauugaaacuguuaucgaguuucagcagaaaaauaacaggcuccuggaaauuacccgggaguucagugugaaugcaggagucacaacucccgugagcaccuauaugcuuacaaacucugagcuguugucccucaucaaugauaugccuaucaccaacgaccaaaagaaacugaugucaaacaaugugcagauuguccgccagcagagcuacaguauaaugugcaucauuaaggaagagguuuuagccuaugugguacaacugccacucuacggcgugaucgauacgcccuguuggaaacuucauacuucuccucugugcacaaccaacacuaaggaaggcuccaauauauguuugacacgaaccgaccgugggugguacugcgauaacgcuggaagcgucucguuuuucccacaggccgagacguguaaggugcagucuaauagaguuuucugcgacaccaugaacucccuaacacugcccucagaagugaaucucugcaacauugauaucuucaauccuaaauaugacuguaagaucaugacaaguaaaaccgaugucagcuccucugugauuacaagccugggugcaaucguaucaugcuacggcaagacuaaauguaccgcuaguaacaagugcagggggauuauaaagacauuuuccaauggaugugacuauguuagcaacaaaggcguggacaccgucucuguggguaauacucuuuacuaugucaacaagcaagaggggcagucacuguacgugaaaggagagccaaucauuaauuucuaugauccguugguuuuucccagugacgaauuugaugccagcaucucccaggugaacgagaagaucaaccagucucucgcguuuauucggaaaucggacgaacuguuacacaauguaaacgucggcaagagcacgacaaauauaaugaucaccacuauuaucauugugaucauaguuauccugcuacuccugauugccgugggccuuuucuuguacugcaaggcacgcugaggacuaguguccaccugucccuccugggcugcuggauugucucguuuuccugccaaauaaacaggaucagcgcuuuacagaucuaaaaaaaaaaaaaaaaaaaaaaaaaaaaaaaaaaaaaaaaaaaaaaaaaaaaaaaaaaaaaaaaugcaucccccccccccccccccccccccccccccccaaaggcucuuuucagagccaccagaauu

SEQ ID NO: 19648 - RNA, 1877 nt, Artificial Sequence
  mRNA product Design e-1 comprising derived and/or modified sequence from HRSV(Memphis-37)__AIY60640.1__F-del_DSCav1_mut8 (opt4)
gggagaauauaagcguuggcggagcgucgguuguagcacucugcgcgcccgcucuucugcugcuguuugucuacuuccuccugcuuccccgccgccgccgccgccaucaagcuuaccauggagcugcccauccugaagaccaacgccaucaccaccauccuggccgccgugacccugugcuucgccagcagccagaacaucaccgaggaguucuaccagagcaccugcagcgccgugagcaagggcuaccugggcgcccugagaaccggcugguacaccagcgugaucaccaucgagcugagcaacaucaaggagaucaagugcaacggcaccgacgccaaggugaagcugaucaagcaggagcuggacaaguacaagaacgccgugaccgaccugcagcugcugaugcagagcacccccgccgccggcagcggcagcgccaucgccagcggcaucgccgugugcaaggugcugcaccuggagggcgaggugaacaagaucaagaacgcccugcugagcaccaacaaggccguggugagccugagcggcugcggcgugagcgugcugaccuucaaggugcuggaccugaagaacuacaucgacaagcagcugcugcccauccugaacaagcagagcugcagcauccccaacaucgagaccgugaucgaguuccagcagaagaacaacagacugcuggagaucaccagagaguucagcgugaacgccggcgugaccacccccgugagcaccuacaugcugaccaacagcgagcugcugagccugaucaacgacaugcccaucaccaacgaccagaagaagcugaugagcaacaacgugcagaucgugagacagcagagcuacagcaucaugugcaucaucaaggaggaggugcuggccuacguggugcagcugccccuguacggcgugaucgacacccccugcuggaagcugcacaccagcccccugugcaccaccaacaccaaggagggcagcaacaucugccugaccagaaccgacagaggcugguacugcgacaacgccggcagcgugagcuucuucccccaggccgagaccugcaaggugcagagcaacagaguguucugcgacaccaugaacagccugacccugcccagcgaggugaaccugugcaacaucgacaucuucaaccccaaguacgacugcaagaucaugaccagcaagaccgacgugagcagcagcgugaucaccagccugggcgccaucgugagcugcuacggcaagaccaagugcaccgccagcaacaagugcagaggcaucaucaagaccuucagcaacggcugcgacuacgugagcaacaagggcguggacaccgugagcgugggcaacacccuguacuacgugaacaagcaggagggccagagccuguacgugaagggcgagcccaucaucaacuucuacgacccccugguguuccccagcgacgaguucgacgccagcaucagccaggugaacgagaagaucaaccagagccuggccuucaucagaaagagcgacgagcugcugcacaacgugaacgugggcaagagcaccaccaacaucaugaucaccaccaucaucaucgugaucaucgugauccugcugcugcugaucgccgugggccuguuccuguacugcaaggccagaugaggacuaguguccaccugucccuccugggcugcuggauugucucguuuuccugccaaauaaacaggaucagcgcuuuacagaucuaaaaaaaaaaaaaaaaaaaaaaaaaaaaaaaaaaaaaaaaaaaaaaaaaaaaaaaaaaaaaaaaugcaucccccccccccccccccccccccccccccccaaaggcucuuuucagagccaccagaauu

SEQ ID NO: 19649 - RNA, 1877 nt, Artificial Sequence
  mRNA product Design e-1 comprising derived and/or modified sequence from HRSV(Memphis-37)__AIY60640.1__F-del_DSCav1_mut8 (opt5)
gggagaauauaagcguuggcggagcgucgguuguagcacucugcgcgcccgcucuucugcugcuguuugucuacuuccuccugcuuccccgccgccgccgccgccaucaagcuuaccauggagcugcccauccucaagaccaacgccauuacaacgauccuggcugccgugacccuuugcuucgcgagcucccagaauauuacagaagaguuuuaccaaucuaccuguagcgcugucuccaaaggcuaucugggggcccucagaacaggaugguacaccucuguuaucacaauugaacugagcaacaucaaggagaucaaaugcaauggcaccgacgccaaggugaaacuuauuaagcaggaacuggauaaguauaaaaacgcugugacggaccuccagcugcugaugcaguccaccccugccgcugggucuggaagcgccaucgcguccggcauugccgucuguaaggugcuccaccuggagggggagguuaauaaaaucaagaacgcccuucugagcacaaauaaagcuguggucucucucuccggaugcggcgugagcguucugaccuucaaggugcuugaucugaagaacuacauugacaaacaacuccugccgauccugaauaagcagucuuguuccauucccaacaucgaaacagucaucgaguuucagcagaaaaauaaccggcuccuggaaauuacccgcgaguucagcgugaaugcuggcgugacgacaccugucucuaccuauaugcuuacaaacuccgagcugcucagccugaucaaugauaugcccauuaccaacgaccaaaagaaacuuauguccaacaauguucagaucgugagacagcagucuuacagcauuaugugcaucaucaaggaagaggugcuggccuaugucgugcaacucccucuguacgggguuauugauacccccuguuggaaacugcauacauccccucucugcacgaccaacacaaaggaaggaagcaauaucugucugacccggacagaccgcggcugguacugcgauaacgcggggucuguguccuuuuucccgcaggccgagaccuguaagguccagagcaauagaguguuuugcgacacgaugaacucucuuacacugcccagcgaaguuaaucucugcaacauugauaucuucaauccuaaauaugacuguaagauuaugaccuccaaaaccgaugugucuagcuccgucaucacaagccugggagcuaucgugucuugcuacggcaagaccaaauguacagccuccaacaagugccgggggauuaucaagacguuuagcaauggaugugacuaugucucuaacaaaggcguggacaccguuuccgugggcaauacacuuuacuaugucaacaagcaagaggggcagagccuguacgugaaaggagagcccauuaucaauuucuaugauccucucguuuuucccuccgacgaguucgaugcuucuauuagccaggugaacgaaaagaucaaccagucccuggccuuuauucgcaaaucugacgaacugcuccacaaugucaacgugggcaagagcaccacaaauaucaugaucaccacgauuaucauugugaucauuguuauccugcuucugcucaucgccgucgggcuguuccuguacugcaaggcuagaugaggacuaguguccaccugucccuccugggcugcuggauugucucguuuuccugccaaauaaacaggaucagcgcuuuacagaucuaaaaaaaaaaaaaaaaaaaaaaaaaaaaaaaaaaaaaaaaaaaaaaaaaaaaaaaaaaaaaaaaugcaucccccccccccccccccccccccccccccccaaaggcucuuuucagagccaccagaauu

SEQ ID NO: 19650 - RNA, 1877 nt, Artificial Sequence
  mRNA product Design e-1 comprising derived and/or modified sequence from HRSV(Memphis-37)__AIY60640.1__F-del_DSCav1_mut8 (opt6)
gggagaauauaagcguuggcggagcgucgguuguagcacucugcgcgcccgcucuucugcugcuguuugucuacuuccuccugcuuccccgccgccgccgccgccaucaagcuuaccauggaacuacccauacuaaaaacaaacgcaauuacaacaauacuugccgcaguaaccuuaugcuuugccucaucccaaaacauaacagaagaauuuuaucaaucaacaugcuccgcaguaucaaaaggauaccuaggcgcucuaagaacaggaugguacacauccguaaucacaauagaacuauccaauauaaaagaaauaaaauguaauggaacagaugcaaaaguuaaauuaauaaaacaagaacuagacaaauacaaaaacgcaguuaccgaucuccaacuauuaaugcaaucaacaccagcugcaggaaguggaagcgccauagcaagcggaauagcagucugcaaaguauuacaucuugaaggcgaaguaaacaaaaucaaaaaugcccuccucucaacaaacaaagcuguaguaucccuaucaggaugcgguguaucuguucuuacauuuaaaguacucgaucuaaaaaacuacaucgauaaacaguuacuuccaauacucaacaaacaaucauguagcauaccaaacauagaaacaguaauagaauuucaacaaaaaaacaaucgacuacucgaaauaacuagagaauuuucuguaaacgcuggaguaaccacaccagugucuaccuauaugcuuacaaauagcgaacuccuaucacuaaucaaugacaugccaauaacaaaugaccagaaaaaacucaugucaaauaacguacaaauaguacgacaacaaagcuacuccauaaugugcauaaucaaagaagaaguauuagccuacguuguucaacuaccauuauauggaguuauagacacuccaugcuggaaauuacauacaagcccacucuguacaacaaacacaaaagaaggcucaaacauaugcuuaacaagaacagauagaggaugguacugcgauaacgcaggcucagucucauuuuuuccacaagccgaaaccugcaaaguacaaucaaauagaguuuuuugcgacacaaugaacucacucacucuaccaagugaaguaaaucucuguaauaucgacauauucaacccaaaauaugacugcaaaauaaugacaucuaaaaccgauguauccucaagcguaaucacaucauuaggagcuauaguuuccugcuacgguaaaacaaaaugcacagcauccaacaaaugucgcgguaucaucaaaacauucuccaacggaugugauuacguaucaaacaaaggugucgacaccguaagcguaggcaacacuuuauacuauguaaacaaacaagaaggacaaagucuauauguaaaaggagaaccaauaauaaacuucuaugacccccuaguauucccuuccgacgaauuugaugcaagcauuucacaaguuaacgaaaaaaucaaucaaucccuugcuuucauaagaaaaucagacgaauuacuacacaacguaaacguaggaaaaagcacaacaaauaucaugauuacaacaauaauaauuguaauaauaguaauacuccucuuacuuauagcagucggcuuauuccuuuacugcaaagcaagauaaggacuaguguccaccugucccuccugggcugcuggauugucucguuuuccugccaaauaaacaggaucagcgcuuuacagaucuaaaaaaaaaaaaaaaaaaaaaaaaaaaaaaaaaaaaaaaaaaaaaaaaaaaaaaaaaaaaaaaaugcaucccccccccccccccccccccccccccccccaaaggcucuuuucagagccaccagaauu

SEQ ID NO: 19651 - RNA, 1877 nt, Artificial Sequence
  mRNA product Design e-1 comprising derived and/or modified sequence from HRSV(Memphis-37)__AIY60640.1__F-del_DSCav1_mut8 (opt11)
gggagaauauaagcguuggcggagcgucgguuguagcacucugcgcgcccgcucuucugcugcuguuugucuacuuccuccugcuuccccgccgccgccgccgccaucaagcuuaccauggaacuccccauccuaaaaaccaacgcaaucaccaccauccucgccgccguaacacucugcuuugcaagcucccaaaacaucaccgaagaauuuuaccaaucuaccugcagcgccguaucuaaaggauaccuaggagcccucagaaccgguugguacaccucugucaucacaauagaacucuccaacaucaaagaaaucaaaugcaacggcaccgacgccaaagucaaacucaucaaacaagaacucgacaaauauaaaaacgccguaaccgaccuccaacuccucaugcaauccacccccgccgccggcaguggcuccgcuaucgccuccggaaucgccguuugcaaaguccugcaccuagaaggcgaagucaacaaaaucaaaaacgcccugcucucaaccaacaaagcugucguaagccucuccggcugcggagucuccguccuuaccuucaaaguacucgaccuuaaaaacuacaucgacaaacaacuucuccccauacucaauaaacaauccugcuccauacccaacaucgaaacagucaucgaguuccaacagaaaaauaaccgccuccucgaaauaacccgcgaguucuccgucaacgcaggcgucaccaccccagucuccaccuacaugcugacaaacuccgaacuccuaucccucaucaacgacaugcccaucaccaacgaccaaaagaaacucaugagcaauaacguccaaaucguacgacaacaauccuacagcaucauguguaucaucaaagaagaaguacucgccuacgucguccaacucccacuauacggcgucaucgacacaccaugcuggaaacuucacaccuccccacucugcaccacaaacacaaaagaaggcuccaacaucugccuuacccgaaccgaccgcgggugguacugcgacaacgccggaucagucucguucuuuccccaagccgaaaccugcaaaguacaaucaaaucgcgucuucugcgacaccaugaacuccuuaacacuaccauccgaaguaaaccucugcaacauagacaucuucaacccaaaauacgacugcaaaaucaugaccuccaaaaccgacguauccuccuccguaaucaccagccucggcgcaauagucucaugcuacggcaaaaccaaaugcaccgccuccaacaaaugccgcggcaucauaaaaacuuucucuaacggaugcgacuacgucagcaacaaaggcgucgacaccguauccguagguaauacacuuuacuacgucaauaaacaagaaggccaaucccucuacgucaaaggagaacccaucauaaacuucuacgacccccucgucuuccccuccgacgaguucgacgccuccaucagccaggucaacgaaaagaucaaccaaucacucgccuucauccgcaaaagcgacgaacuccuccacaacguaaacgucggcaaauccacaaccaacauaaugaucaccacuaucaucaucgugauaaucgucauuuuacuucuccucaucgccguaggccucuuccuauacugcaaagcccgcuaaggacuaguguccaccugucccuccugggcugcuggauugucucguuuuccugccaaauaaacaggaucagcgcuuuacagaucuaaaaaaaaaaaaaaaaaaaaaaaaaaaaaaaaaaaaaaaaaaaaaaaaaaaaaaaaaaaaaaaaugcaucccccccccccccccccccccccccccccccaaaggcucuuuucagagccaccagaauu

SEQ ID NO: 19652 - RNA, 1859 nt, Artificial Sequence
  mRNA product Design e-2 comprising derived and/or modified sequence from HRSV(Memphis-37)__AIY60640.1__F-del_DSCav1_mut8 (opt1)
gggagacccgugacccggaaguuguacggcuacgcgacuuucccucccacaaacccucgcgcccuuccuuuccuacuugggcccggcagaaagcuuaccauggagcugcccauccucaagaccaacgccaucaccacgauccuggccgcggugacccugugcuucgccagcucccagaacaucaccgaggaguucuaccagagcacgugcuccgccgucagcaagggcuaccucggcgcccugcgcaccgggugguacaccagcgugaucaccaucgagcuguccaacaucaaggagaucaagugcaacggcaccgacgccaaggugaagcucaucaagcaggagcuggacaaguacaagaacgcggucacggaccugcagcuccugaugcagagcaccccggccgccggcuccgggagcgcgaucgccuccggcaucgccgucugcaaggugcugcaccucgagggcgaggugaacaagaucaagaacgcccugcuguccaccaacaaggccgucgugagccucuccggcugcggggugagcguccugaccuucaaggugcuggaccucaagaacuacaucgacaagcagcugcugcccauccugaacaagcagagcugcuccauccccaacaucgagaccgucaucgaguuccagcagaagaacaaccgccuccuggagaucacgcgggaguucagcgugaacgcgggcgugaccacccccgucuccaccuacaugcugacgaacagcgagcuccugucccugaucaacgacaugccgaucaccaacgaccagaagaagcucaugagcaacaacgugcagaucgugcgccagcaguccuacagcaucaugugcaucaucaaggaggagguccuggccuacguggugcagcugccccucuacggggucaucgacacccccugcuggaagcugcacaccagcccccugugcacgaccaacaccaaggagggcuccaacaucugccucacccggacggaccgcgggugguacugcgacaacgccggcagcguguccuucuucccgcaggccgagaccugcaagguccagagcaaccggguguucugcgacaccaugaacucccugacccugcccagcgaggugaaccucugcaacaucgacaucuucaaccccaaguacgacugcaagaucaugacguccaagaccgacgucagcuccagcgugaucaccucccugggcgccaucgugagcugcuacgggaagaccaagugcacggcgagcaacaagugccgcggcaucaucaagaccuucuccaacgggugcgacuacgucagcaacaagggcguggacaccguguccgucggcaacacccuguacuacgugaacaagcaggagggccagagccucuacgugaagggggagcccaucaucaacuucuacgacccgcuggucuuccccuccgacgaguucgacgccagcaucucccaggugaacgagaagaucaaccagagccuggccuucauccggaaguccgacgagcuccugcacaacgugaacgucggcaagagcaccacgaacaucaugaucaccaccaucaucaucgugaucaucgugauccugcugcuccugaucgccgucgggcuguuccucuacugcaaggcccgcugaggacuaguguccaccugucccuccugggcugcuggauugucucguuuuccugccaaauaaacaggaucagcgcuuuacagaucuaaaaaaaaaaaaaaaaaaaaaaaaaaaaaaaaaaaaaaaaaaaaaaaaaaaaaaaaaaaaaaaaugcaucccccccccccccccccccccccccccccccaaaggcucuuuucagagccaccagaauu

SEQ ID NO: 19653 - RNA, 1859 nt, Artificial Sequence
  mRNA product Design e-2 comprising derived and/or modified sequence from HRSV(Memphis-37)__AIY60640.1__F-del_DSCav1_mut8 (opt1)
gggagacccgugacccggaaguuguacggcuacgcgacuuucccucccacaaacccucgcgcccuuccuuuccuacuugggcccggcagaaagcuuaccauggagcugcccauccucaagaccaacgccaucaccacgauccuggccgcggugacccugugcuucgccagcucccagaacaucaccgaggaguucuaccagagcacgugcuccgccgucagcaagggcuaccucggggcccugcgcaccggcugguacaccuccgugaucaccaucgagcugagcaacaucaaggagaucaagugcaacgggaccgacgccaaggugaagcucaucaagcaggagcuggacaaguacaagaacgcggucacggaccugcagcuccugaugcaguccaccccggccgccggcagcggguccgccaucgcgagcggcaucgccgugugcaaggugcugcaccucgagggcgaggucaacaagaucaagaacgcccugcuguccaccaacaaggccguggugagccucuccgggugcggcgucagcgugcugaccuucaaggugcuggaccucaagaacuacaucgacaagcagcugcugcccauccucaacaagcaguccugcagcauccccaacaucgagacggucaucgaguuccagcagaagaacaaccggcugcuggagaucacccgcgaguucuccgugaacgccggggugaccacccccgucagcacguacaugcucaccaacuccgagcugcugagccucaucaacgacaugccgaucaccaacgaccagaagaagcugaugagcaacaacgugcagaucgugcggcagcaguccuacagcaucaugugcaucaucaaggaggagguccuggcguacguggugcagcucccccuguacggcgucaucgacacccccugcuggaagcugcacacgagcccccucugcaccaccaacaccaaggagggguccaacaucugccugacgcgcaccgaccggggcugguacugcgacaacgccggcuccgugagcuucuucccgcaggccgagaccugcaaggugcaguccaaccgcgucuucugcgacaccaugaacagccugacgcuccccuccgaggugaaccugugcaacaucgacaucuucaaccccaaguacgacugcaagaucaugaccagcaagaccgacgucuccagcuccgugaucaccagccugggggccaucguguccugcuacggcaagacgaagugcaccgccagcaacaagugccgggggaucaucaagaccuucuccaacggcugcgacuacgucagcaacaagggcguggacaccguguccgucgggaacacgcucuacuacgugaacaagcaggagggccagagccuguacgugaagggggagcccaucaucaacuucuacgacccgcuggucuuccccagcgacgaguucgacgcguccaucagccaggugaacgagaagaucaaccagucccucgccuucauccgcaagagcgacgagcugcugcacaacgugaacgucggcaaguccaccaccaacaucaugaucaccaccaucaucaucgugaucaucgugauccuccugcugcucaucgccgucgggcuguuccuguacugcaaggcccggugaggacuaguguccaccugucccuccugggcugcuggauugucucguuuuccugccaaauaaacaggaucagcgcuuuacagaucuaaaaaaaaaaaaaaaaaaaaaaaaaaaaaaaaaaaaaaaaaaaaaaaaaaaaaaaaaaaaaaaaugcaucccccccccccccccccccccccccccccccaaaggcucuuuucagagccaccagaauu

SEQ ID NO: 19654 - RNA, 1859 nt, Artificial Sequence
  mRNA product Design e-2 comprising derived and/or modified sequence from HRSV(Memphis-37)__AIY60640.1__F-del_DSCav1_mut8 (opt2)
gggagacccgugacccggaaguuguacggcuacgcgacuuucccucccacaaacccucgcgcccuuccuuuccuacuugggcccggcagaaagcuuaccauggagcuccccauccucaagaccaacgccaucaccaccauccucgccgccgucacccucugcuucgccuccucccagaacaucaccgaggaguucuaccaguccaccugcuccgccgucuccaagggcuaccucggcgcccuccgcaccggcugguacaccuccgucaucaccaucgagcucuccaacaucaaggagaucaagugcaacggcaccgacgccaaggucaagcucaucaagcaggagcucgacaaguacaagaacgccgucaccgaccuccagcuccucaugcaguccacccccgccgccggcuccggcuccgccaucgccuccggcaucgccgucugcaagguccuccaccucgagggcgaggucaacaagaucaagaacgcccuccucuccaccaacaaggccgucgucucccucuccggcugcggcgucuccguccucaccuucaagguccucgaccucaagaacuacaucgacaagcagcuccuccccauccucaacaagcaguccugcuccauccccaacaucgagaccgucaucgaguuccagcagaagaacaaccgccuccucgagaucacccgcgaguucuccgucaacgccggcgucaccacccccgucuccaccuacaugcucaccaacuccgagcuccucucccucaucaacgacaugcccaucaccaacgaccagaagaagcucauguccaacaacguccagaucguccgccagcaguccuacuccaucaugugcaucaucaaggaggagguccucgccuacgucguccagcucccccucuacggcgucaucgacacccccugcuggaagcuccacaccuccccccucugcaccaccaacaccaaggagggcuccaacaucugccucacccgcaccgaccgcggcugguacugcgacaacgccggcuccgucuccuucuucccccaggccgagaccugcaagguccaguccaaccgcgucuucugcgacaccaugaacucccucacccuccccuccgaggucaaccucugcaacaucgacaucuucaaccccaaguacgacugcaagaucaugaccuccaagaccgacgucuccuccuccgucaucaccucccucggcgccaucgucuccugcuacggcaagaccaagugcaccgccuccaacaagugccgcggcaucaucaagaccuucuccaacggcugcgacuacgucuccaacaagggcgucgacaccgucuccgucggcaacacccucuacuacgucaacaagcaggagggccagucccucuacgucaagggcgagcccaucaucaacuucuacgacccccucgucuuccccuccgacgaguucgacgccuccaucucccaggucaacgagaagaucaaccagucccucgccuucauccgcaaguccgacgagcuccuccacaacgucaacgucggcaaguccaccaccaacaucaugaucaccaccaucaucaucgucaucaucgucauccuccuccuccucaucgccgucggccucuuccucuacugcaaggcccgcugaggacuaguguccaccugucccuccugggcugcuggauugucucguuuuccugccaaauaaacaggaucagcgcuuuacagaucuaaaaaaaaaaaaaaaaaaaaaaaaaaaaaaaaaaaaaaaaaaaaaaaaaaaaaaaaaaaaaaaaugcaucccccccccccccccccccccccccccccccaaaggcucuuuucagagccaccagaauu

SEQ ID NO: 19655 - RNA, 1859 nt, Artificial Sequence
  mRNA product Design e-2 comprising derived and/or modified sequence from HRSV(Memphis-37)__AIY60640.1__F-del_DSCav1_mut8 (opt3)
gggagacccgugacccggaaguuguacggcuacgcgacuuucccucccacaaacccucgcgcccuuccuuuccuacuugggcccggcagaaagcuuaccauggagcugcccauccucaagaccaacgccauuacaacuauacuugcugcagugacgcugugcuucgccagcucccagaauaucaccgaagaguuuuaccaaucuacauguucagcggucaguaaaggcuauuugggggcuuuaagaacuggaugguacaccagcguuauuacaaucgaacuguccaacauuaaggagaucaaaugcaaugguaccgacgccaaggugaaacuaauaaagcaggaacucgauaaguauaaaaacgcaguaacugaccugcagcuucugaugcagucuacuccugccgcuggcucggggucagcaaucgccagcggaauugcuguguguaaggucuugcaccucgagggcgaggugaauaaaaucaagaacgcccugcugaguaccaauaaagcgguugugucccucucugguugcggggucagcguguuaacguucaagguacuggaucuuaagaacuacauugacaaacaauugcugccaauccuaaauaagcaguccuguucaauaccgaacauugaaacuguuaucgaguuucagcagaaaaauaacaggcuccuggaaauuacccgggaguucagugugaaugcaggagucacaacucccgugagcaccuauaugcuuacaaacucugagcuguugucccucaucaaugauaugccuaucaccaacgaccaaaagaaacugaugucaaacaaugugcagauuguccgccagcagagcuacaguauaaugugcaucauuaaggaagagguuuuagccuaugugguacaacugccacucuacggcgugaucgauacgcccuguuggaaacuucauacuucuccucugugcacaaccaacacuaaggaaggcuccaauauauguuugacacgaaccgaccgugggugguacugcgauaacgcuggaagcgucucguuuuucccacaggccgagacguguaaggugcagucuaauagaguuuucugcgacaccaugaacucccuaacacugcccucagaagugaaucucugcaacauugauaucuucaauccuaaauaugacuguaagaucaugacaaguaaaaccgaugucagcuccucugugauuacaagccugggugcaaucguaucaugcuacggcaagacuaaauguaccgcuaguaacaagugcagggggauuauaaagacauuuuccaauggaugugacuauguuagcaacaaaggcguggacaccgucucuguggguaauacucuuuacuaugucaacaagcaagaggggcagucacuguacgugaaaggagagccaaucauuaauuucuaugauccguugguuuuucccagugacgaauuugaugccagcaucucccaggugaacgagaagaucaaccagucucucgcguuuauucggaaaucggacgaacuguuacacaauguaaacgucggcaagagcacgacaaauauaaugaucaccacuauuaucauugugaucauaguuauccugcuacuccugauugccgugggccuuuucuuguacugcaaggcacgcugaggacuaguguccaccugucccuccugggcugcuggauugucucguuuuccugccaaauaaacaggaucagcgcuuuacagaucuaaaaaaaaaaaaaaaaaaaaaaaaaaaaaaaaaaaaaaaaaaaaaaaaaaaaaaaaaaaaaaaaugcaucccccccccccccccccccccccccccccccaaaggcucuuuucagagccaccagaauu

SEQ ID NO: 19656 - RNA, 1859 nt, Artificial Sequence
  mRNA product Design e-2 comprising derived and/or modified sequence from HRSV(Memphis-37)__AIY60640.1__F-del_DSCav1_mut8 (opt4)
gggagacccgugacccggaaguuguacggcuacgcgacuuucccucccacaaacccucgcgcccuuccuuuccuacuugggcccggcagaaagcuuaccauggagcugcccauccugaagaccaacgccaucaccaccauccuggccgccgugacccugugcuucgccagcagccagaacaucaccgaggaguucuaccagagcaccugcagcgccgugagcaagggcuaccugggcgcccugagaaccggcugguacaccagcgugaucaccaucgagcugagcaacaucaaggagaucaagugcaacggcaccgacgccaaggugaagcugaucaagcaggagcuggacaaguacaagaacgccgugaccgaccugcagcugcugaugcagagcacccccgccgccggcagcggcagcgccaucgccagcggcaucgccgugugcaaggugcugcaccuggagggcgaggugaacaagaucaagaacgcccugcugagcaccaacaaggccguggugagccugagcggcugcggcgugagcgugcugaccuucaaggugcuggaccugaagaacuacaucgacaagcagcugcugcccauccugaacaagcagagcugcagcauccccaacaucgagaccgugaucgaguuccagcagaagaacaacagacugcuggagaucaccagagaguucagcgugaacgccggcgugaccacccccgugagcaccuacaugcugaccaacagcgagcugcugagccugaucaacgacaugcccaucaccaacgaccagaagaagcugaugagcaacaacgugcagaucgugagacagcagagcuacagcaucaugugcaucaucaaggaggaggugcuggccuacguggugcagcugccccuguacggcgugaucgacacccccugcuggaagcugcacaccagcccccugugcaccaccaacaccaaggagggcagcaacaucugccugaccagaaccgacagaggcugguacugcgacaacgccggcagcgugagcuucuucccccaggccgagaccugcaaggugcagagcaacagaguguucugcgacaccaugaacagccugacccugcccagcgaggugaaccugugcaacaucgacaucuucaaccccaaguacgacugcaagaucaugaccagcaagaccgacgugagcagcagcgugaucaccagccugggcgccaucgugagcugcuacggcaagaccaagugcaccgccagcaacaagugcagaggcaucaucaagaccuucagcaacggcugcgacuacgugagcaacaagggcguggacaccgugagcgugggcaacacccuguacuacgugaacaagcaggagggccagagccuguacgugaagggcgagcccaucaucaacuucuacgacccccugguguuccccagcgacgaguucgacgccagcaucagccaggugaacgagaagaucaaccagagccuggccuucaucagaaagagcgacgagcugcugcacaacgugaacgugggcaagagcaccaccaacaucaugaucaccaccaucaucaucgugaucaucgugauccugcugcugcugaucgccgugggccuguuccuguacugcaaggccagaugaggacuaguguccaccugucccuccugggcugcuggauugucucguuuuccugccaaauaaacaggaucagcgcuuuacagaucuaaaaaaaaaaaaaaaaaaaaaaaaaaaaaaaaaaaaaaaaaaaaaaaaaaaaaaaaaaaaaaaaugcaucccccccccccccccccccccccccccccccaaaggcucuuuucagagccaccagaauu

SEQ ID NO: 19657 - RNA, 1859 nt, Artificial Sequence
  mRNA product Design e-2 comprising derived and/or modified sequence from HRSV(Memphis-37)__AIY60640.1__F-del_DSCav1_mut8 (opt5)
gggagacccgugacccggaaguuguacggcuacgcgacuuucccucccacaaacccucgcgcccuuccuuuccuacuugggcccggcagaaagcuuaccauggagcugcccauccucaagaccaacgccauuacaacgauccuggcugccgugacccuuugcuucgcgagcucccagaauauuacagaagaguuuuaccaaucuaccuguagcgcugucuccaaaggcuaucugggggcccucagaacaggaugguacaccucuguuaucacaauugaacugagcaacaucaaggagaucaaaugcaauggcaccgacgccaaggugaaacuuauuaagcaggaacuggauaaguauaaaaacgcugugacggaccuccagcugcugaugcaguccaccccugccgcugggucuggaagcgccaucgcguccggcauugccgucuguaaggugcuccaccuggagggggagguuaauaaaaucaagaacgcccuucugagcacaaauaaagcuguggucucucucuccggaugcggcgugagcguucugaccuucaaggugcuugaucugaagaacuacauugacaaacaacuccugccgauccugaauaagcagucuuguuccauucccaacaucgaaacagucaucgaguuucagcagaaaaauaaccggcuccuggaaauuacccgcgaguucagcgugaaugcuggcgugacgacaccugucucuaccuauaugcuuacaaacuccgagcugcucagccugaucaaugauaugcccauuaccaacgaccaaaagaaacuuauguccaacaauguucagaucgugagacagcagucuuacagcauuaugugcaucaucaaggaagaggugcuggccuaugucgugcaacucccucuguacgggguuauugauacccccuguuggaaacugcauacauccccucucugcacgaccaacacaaaggaaggaagcaauaucugucugacccggacagaccgcggcugguacugcgauaacgcggggucuguguccuuuuucccgcaggccgagaccuguaagguccagagcaauagaguguuuugcgacacgaugaacucucuuacacugcccagcgaaguuaaucucugcaacauugauaucuucaauccuaaauaugacuguaagauuaugaccuccaaaaccgaugugucuagcuccgucaucacaagccugggagcuaucgugucuugcuacggcaagaccaaauguacagccuccaacaagugccgggggauuaucaagacguuuagcaauggaugugacuaugucucuaacaaaggcguggacaccguuuccgugggcaauacacuuuacuaugucaacaagcaagaggggcagagccuguacgugaaaggagagcccauuaucaauuucuaugauccucucguuuuucccuccgacgaguucgaugcuucuauuagccaggugaacgaaaagaucaaccagucccuggccuuuauucgcaaaucugacgaacugcuccacaaugucaacgugggcaagagcaccacaaauaucaugaucaccacgauuaucauugugaucauuguuauccugcuucugcucaucgccgucgggcuguuccuguacugcaaggcuagaugaggacuaguguccaccugucccuccugggcugcuggauugucucguuuuccugccaaauaaacaggaucagcgcuuuacagaucuaaaaaaaaaaaaaaaaaaaaaaaaaaaaaaaaaaaaaaaaaaaaaaaaaaaaaaaaaaaaaaaaugcaucccccccccccccccccccccccccccccccaaaggcucuuuucagagccaccagaauu

SEQ ID NO: 19658 - RNA, 1859 nt, Artificial Sequence
  mRNA product Design e-2 comprising derived and/or modified sequence from HRSV(Memphis-37)__AIY60640.1__F-del_DSCav1_mut8 (opt6)
gggagacccgugacccggaaguuguacggcuacgcgacuuucccucccacaaacccucgcgcccuuccuuuccuacuugggcccggcagaaagcuuaccauggaacuacccauacuaaaaacaaacgcaauuacaacaauacuugccgcaguaaccuuaugcuuugccucaucccaaaacauaacagaagaauuuuaucaaucaacaugcuccgcaguaucaaaaggauaccuaggcgcucuaagaacaggaugguacacauccguaaucacaauagaacuauccaauauaaaagaaauaaaauguaauggaacagaugcaaaaguuaaauuaauaaaacaagaacuagacaaauacaaaaacgcaguuaccgaucuccaacuauuaaugcaaucaacaccagcugcaggaaguggaagcgccauagcaagcggaauagcagucugcaaaguauuacaucuugaaggcgaaguaaacaaaaucaaaaaugcccuccucucaacaaacaaagcuguaguaucccuaucaggaugcgguguaucuguucuuacauuuaaaguacucgaucuaaaaaacuacaucgauaaacaguuacuuccaauacucaacaaacaaucauguagcauaccaaacauagaaacaguaauagaauuucaacaaaaaaacaaucgacuacucgaaauaacuagagaauuuucuguaaacgcuggaguaaccacaccagugucuaccuauaugcuuacaaauagcgaacuccuaucacuaaucaaugacaugccaauaacaaaugaccagaaaaaacucaugucaaauaacguacaaauaguacgacaacaaagcuacuccauaaugugcauaaucaaagaagaaguauuagccuacguuguucaacuaccauuauauggaguuauagacacuccaugcuggaaauuacauacaagcccacucuguacaacaaacacaaaagaaggcucaaacauaugcuuaacaagaacagauagaggaugguacugcgauaacgcaggcucagucucauuuuuuccacaagccgaaaccugcaaaguacaaucaaauagaguuuuuugcgacacaaugaacucacucacucuaccaagugaaguaaaucucuguaauaucgacauauucaacccaaaauaugacugcaaaauaaugacaucuaaaaccgauguauccucaagcguaaucacaucauuaggagcuauaguuuccugcuacgguaaaacaaaaugcacagcauccaacaaaugucgcgguaucaucaaaacauucuccaacggaugugauuacguaucaaacaaaggugucgacaccguaagcguaggcaacacuuuauacuauguaaacaaacaagaaggacaaagucuauauguaaaaggagaaccaauaauaaacuucuaugacccccuaguauucccuuccgacgaauuugaugcaagcauuucacaaguuaacgaaaaaaucaaucaaucccuugcuuucauaagaaaaucagacgaauuacuacacaacguaaacguaggaaaaagcacaacaaauaucaugauuacaacaauaauaauuguaauaauaguaauacuccucuuacuuauagcagucggcuuauuccuuuacugcaaagcaagauaaggacuaguguccaccugucccuccugggcugcuggauugucucguuuuccugccaaauaaacaggaucagcgcuuuacagaucuaaaaaaaaaaaaaaaaaaaaaaaaaaaaaaaaaaaaaaaaaaaaaaaaaaaaaaaaaaaaaaaaugcaucccccccccccccccccccccccccccccccaaaggcucuuuucagagccaccagaauu

SEQ ID NO: 19659 - RNA, 1859 nt, Artificial Sequence
  mRNA product Design e-2 comprising derived and/or modified sequence from HRSV(Memphis-37)__AIY60640.1__F-del_DSCav1_mut8 (opt11)
gggagacccgugacccggaaguuguacggcuacgcgacuuucccucccacaaacccucgcgcccuuccuuuccuacuugggcccggcagaaagcuuaccauggaacuccccauccuaaaaaccaacgcaaucaccaccauccucgccgccguaacacucugcuuugcaagcucccaaaacaucaccgaagaauuuuaccaaucuaccugcagcgccguaucuaaaggauaccuaggagcccucagaaccgguugguacaccucugucaucacaauagaacucuccaacaucaaagaaaucaaaugcaacggcaccgacgccaaagucaaacucaucaaacaagaacucgacaaauauaaaaacgccguaaccgaccuccaacuccucaugcaauccacccccgccgccggcaguggcuccgcuaucgccuccggaaucgccguuugcaaaguccugcaccuagaaggcgaagucaacaaaaucaaaaacgcccugcucucaaccaacaaagcugucguaagccucuccggcugcggagucuccguccuuaccuucaaaguacucgaccuuaaaaacuacaucgacaaacaacuucuccccauacucaauaaacaauccugcuccauacccaacaucgaaacagucaucgaguuccaacagaaaaauaaccgccuccucgaaauaacccgcgaguucuccgucaacgcaggcgucaccaccccagucuccaccuacaugcugacaaacuccgaacuccuaucccucaucaacgacaugcccaucaccaacgaccaaaagaaacucaugagcaauaacguccaaaucguacgacaacaauccuacagcaucauguguaucaucaaagaagaaguacucgccuacgucguccaacucccacuauacggcgucaucgacacaccaugcuggaaacuucacaccuccccacucugcaccacaaacacaaaagaaggcuccaacaucugccuuacccgaaccgaccgcgggugguacugcgacaacgccggaucagucucguucuuuccccaagccgaaaccugcaaaguacaaucaaaucgcgucuucugcgacaccaugaacuccuuaacacuaccauccgaaguaaaccucugcaacauagacaucuucaacccaaaauacgacugcaaaaucaugaccuccaaaaccgacguauccuccuccguaaucaccagccucggcgcaauagucucaugcuacggcaaaaccaaaugcaccgccuccaacaaaugccgcggcaucauaaaaacuuucucuaacggaugcgacuacgucagcaacaaaggcgucgacaccguauccguagguaauacacuuuacuacgucaauaaacaagaaggccaaucccucuacgucaaaggagaacccaucauaaacuucuacgacccccucgucuuccccuccgacgaguucgacgccuccaucagccaggucaacgaaaagaucaaccaaucacucgccuucauccgcaaaagcgacgaacuccuccacaacguaaacgucggcaaauccacaaccaacauaaugaucaccacuaucaucaucgugauaaucgucauuuuacuucuccucaucgccguaggccucuuccuauacugcaaagcccgcuaaggacuaguguccaccugucccuccugggcugcuggauugucucguuuuccugccaaauaaacaggaucagcgcuuuacagaucuaaaaaaaaaaaaaaaaaaaaaaaaaaaaaaaaaaaaaaaaaaaaaaaaaaaaaaaaaaaaaaaaugcaucccccccccccccccccccccccccccccccaaaggcucuuuucagagccaccagaauu

SEQ ID NO: 19660 - RNA, 1829 nt, Artificial Sequence
  mRNA product Design e-3 comprising derived and/or modified sequence from HRSV(Memphis-37)__AIY60640.1__F-del_DSCav1_mut8 (opt1)
gggagacuuucccauucuguagcagaauuugguguugccuguggucuuggucccgcggagaagcuuaccauggagcugcccauccucaagaccaacgccaucaccacgauccuggccgcggugacccugugcuucgccagcucccagaacaucaccgaggaguucuaccagagcacgugcuccgccgucagcaagggcuaccucggcgcccugcgcaccgggugguacaccagcgugaucaccaucgagcuguccaacaucaaggagaucaagugcaacggcaccgacgccaaggugaagcucaucaagcaggagcuggacaaguacaagaacgcggucacggaccugcagcuccugaugcagagcaccccggccgccggcuccgggagcgcgaucgccuccggcaucgccgucugcaaggugcugcaccucgagggcgaggugaacaagaucaagaacgcccugcuguccaccaacaaggccgucgugagccucuccggcugcggggugagcguccugaccuucaaggugcuggaccucaagaacuacaucgacaagcagcugcugcccauccugaacaagcagagcugcuccauccccaacaucgagaccgucaucgaguuccagcagaagaacaaccgccuccuggagaucacgcgggaguucagcgugaacgcgggcgugaccacccccgucuccaccuacaugcugacgaacagcgagcuccugucccugaucaacgacaugccgaucaccaacgaccagaagaagcucaugagcaacaacgugcagaucgugcgccagcaguccuacagcaucaugugcaucaucaaggaggagguccuggccuacguggugcagcugccccucuacggggucaucgacacccccugcuggaagcugcacaccagcccccugugcacgaccaacaccaaggagggcuccaacaucugccucacccggacggaccgcgggugguacugcgacaacgccggcagcguguccuucuucccgcaggccgagaccugcaagguccagagcaaccggguguucugcgacaccaugaacucccugacccugcccagcgaggugaaccucugcaacaucgacaucuucaaccccaaguacgacugcaagaucaugacguccaagaccgacgucagcuccagcgugaucaccucccugggcgccaucgugagcugcuacgggaagaccaagugcacggcgagcaacaagugccgcggcaucaucaagaccuucuccaacgggugcgacuacgucagcaacaagggcguggacaccguguccgucggcaacacccuguacuacgugaacaagcaggagggccagagccucuacgugaagggggagcccaucaucaacuucuacgacccgcuggucuuccccuccgacgaguucgacgccagcaucucccaggugaacgagaagaucaaccagagccuggccuucauccggaaguccgacgagcuccugcacaacgugaacgucggcaagagcaccacgaacaucaugaucaccaccaucaucaucgugaucaucgugauccugcugcuccugaucgccgucgggcuguuccucuacugcaaggcccgcugaggacuaguguccaccugucccuccugggcugcuggauugucucguuuuccugccaaauaaacaggaucagcgcuuuacagaucuaaaaaaaaaaaaaaaaaaaaaaaaaaaaaaaaaaaaaaaaaaaaaaaaaaaaaaaaaaaaaaaaugcaucccccccccccccccccccccccccccccccaaaggcucuuuucagagccaccagaauu

SEQ ID NO: 19661 - RNA, 1829 nt, Artificial Sequence
  mRNA product Design e-3 comprising derived and/or modified sequence from HRSV(Memphis-37)__AIY60640.1__F-del_DSCav1_mut8 (opt1)
gggagacuuucccauucuguagcagaauuugguguugccuguggucuuggucccgcggagaagcuuaccauggagcugcccauccucaagaccaacgccaucaccacgauccuggccgcggugacccugugcuucgccagcucccagaacaucaccgaggaguucuaccagagcacgugcuccgccgucagcaagggcuaccucggggcccugcgcaccggcugguacaccuccgugaucaccaucgagcugagcaacaucaaggagaucaagugcaacgggaccgacgccaaggugaagcucaucaagcaggagcuggacaaguacaagaacgcggucacggaccugcagcuccugaugcaguccaccccggccgccggcagcggguccgccaucgcgagcggcaucgccgugugcaaggugcugcaccucgagggcgaggucaacaagaucaagaacgcccugcuguccaccaacaaggccguggugagccucuccgggugcggcgucagcgugcugaccuucaaggugcuggaccucaagaacuacaucgacaagcagcugcugcccauccucaacaagcaguccugcagcauccccaacaucgagacggucaucgaguuccagcagaagaacaaccggcugcuggagaucacccgcgaguucuccgugaacgccggggugaccacccccgucagcacguacaugcucaccaacuccgagcugcugagccucaucaacgacaugccgaucaccaacgaccagaagaagcugaugagcaacaacgugcagaucgugcggcagcaguccuacagcaucaugugcaucaucaaggaggagguccuggcguacguggugcagcucccccuguacggcgucaucgacacccccugcuggaagcugcacacgagcccccucugcaccaccaacaccaaggagggguccaacaucugccugacgcgcaccgaccggggcugguacugcgacaacgccggcuccgugagcuucuucccgcaggccgagaccugcaaggugcaguccaaccgcgucuucugcgacaccaugaacagccugacgcuccccuccgaggugaaccugugcaacaucgacaucuucaaccccaaguacgacugcaagaucaugaccagcaagaccgacgucuccagcuccgugaucaccagccugggggccaucguguccugcuacggcaagacgaagugcaccgccagcaacaagugccgggggaucaucaagaccuucuccaacggcugcgacuacgucagcaacaagggcguggacaccguguccgucgggaacacgcucuacuacgugaacaagcaggagggccagagccuguacgugaagggggagcccaucaucaacuucuacgacccgcuggucuuccccagcgacgaguucgacgcguccaucagccaggugaacgagaagaucaaccagucccucgccuucauccgcaagagcgacgagcugcugcacaacgugaacgucggcaaguccaccaccaacaucaugaucaccaccaucaucaucgugaucaucgugauccuccugcugcucaucgccgucgggcuguuccuguacugcaaggcccggugaggacuaguguccaccugucccuccugggcugcuggauugucucguuuuccugccaaauaaacaggaucagcgcuuuacagaucuaaaaaaaaaaaaaaaaaaaaaaaaaaaaaaaaaaaaaaaaaaaaaaaaaaaaaaaaaaaaaaaaugcaucccccccccccccccccccccccccccccccaaaggcucuuuucagagccaccagaauu

SEQ ID NO: 19662 - RNA, 1829 nt, Artificial Sequence
  mRNA product Design e-3 comprising derived and/or modified sequence from HRSV(Memphis-37)__AIY60640.1__F-del_DSCav1_mut8 (opt2)
gggagacuuucccauucuguagcagaauuugguguugccuguggucuuggucccgcggagaagcuuaccauggagcuccccauccucaagaccaacgccaucaccaccauccucgccgccgucacccucugcuucgccuccucccagaacaucaccgaggaguucuaccaguccaccugcuccgccgucuccaagggcuaccucggcgcccuccgcaccggcugguacaccuccgucaucaccaucgagcucuccaacaucaaggagaucaagugcaacggcaccgacgccaaggucaagcucaucaagcaggagcucgacaaguacaagaacgccgucaccgaccuccagcuccucaugcaguccacccccgccgccggcuccggcuccgccaucgccuccggcaucgccgucugcaagguccuccaccucgagggcgaggucaacaagaucaagaacgcccuccucuccaccaacaaggccgucgucucccucuccggcugcggcgucuccguccucaccuucaagguccucgaccucaagaacuacaucgacaagcagcuccuccccauccucaacaagcaguccugcuccauccccaacaucgagaccgucaucgaguuccagcagaagaacaaccgccuccucgagaucacccgcgaguucuccgucaacgccggcgucaccacccccgucuccaccuacaugcucaccaacuccgagcuccucucccucaucaacgacaugcccaucaccaacgaccagaagaagcucauguccaacaacguccagaucguccgccagcaguccuacuccaucaugugcaucaucaaggaggagguccucgccuacgucguccagcucccccucuacggcgucaucgacacccccugcuggaagcuccacaccuccccccucugcaccaccaacaccaaggagggcuccaacaucugccucacccgcaccgaccgcggcugguacugcgacaacgccggcuccgucuccuucuucccccaggccgagaccugcaagguccaguccaaccgcgucuucugcgacaccaugaacucccucacccuccccuccgaggucaaccucugcaacaucgacaucuucaaccccaaguacgacugcaagaucaugaccuccaagaccgacgucuccuccuccgucaucaccucccucggcgccaucgucuccugcuacggcaagaccaagugcaccgccuccaacaagugccgcggcaucaucaagaccuucuccaacggcugcgacuacgucuccaacaagggcgucgacaccgucuccgucggcaacacccucuacuacgucaacaagcaggagggccagucccucuacgucaagggcgagcccaucaucaacuucuacgacccccucgucuuccccuccgacgaguucgacgccuccaucucccaggucaacgagaagaucaaccagucccucgccuucauccgcaaguccgacgagcuccuccacaacgucaacgucggcaaguccaccaccaacaucaugaucaccaccaucaucaucgucaucaucgucauccuccuccuccucaucgccgucggccucuuccucuacugcaaggcccgcugaggacuaguguccaccugucccuccugggcugcuggauugucucguuuuccugccaaauaaacaggaucagcgcuuuacagaucuaaaaaaaaaaaaaaaaaaaaaaaaaaaaaaaaaaaaaaaaaaaaaaaaaaaaaaaaaaaaaaaaugcaucccccccccccccccccccccccccccccccaaaggcucuuuucagagccaccagaauu

SEQ ID NO: 19663 - RNA, 1829 nt, Artificial Sequence
  mRNA product Design e-3 comprising derived and/or modified sequence from HRSV(Memphis-37)__AIY60640.1__F-del_DSCav1_mut8 (opt3)
gggagacuuucccauucuguagcagaauuugguguugccuguggucuuggucccgcggagaagcuuaccauggagcugcccauccucaagaccaacgccauuacaacuauacuugcugcagugacgcugugcuucgccagcucccagaauaucaccgaagaguuuuaccaaucuacauguucagcggucaguaaaggcuauuugggggcuuuaagaacuggaugguacaccagcguuauuacaaucgaacuguccaacauuaaggagaucaaaugcaaugguaccgacgccaaggugaaacuaauaaagcaggaacucgauaaguauaaaaacgcaguaacugaccugcagcuucugaugcagucuacuccugccgcuggcucggggucagcaaucgccagcggaauugcuguguguaaggucuugcaccucgagggcgaggugaauaaaaucaagaacgcccugcugaguaccaauaaagcgguugugucccucucugguugcggggucagcguguuaacguucaagguacuggaucuuaagaacuacauugacaaacaauugcugccaauccuaaauaagcaguccuguucaauaccgaacauugaaacuguuaucgaguuucagcagaaaaauaacaggcuccuggaaauuacccgggaguucagugugaaugcaggagucacaacucccgugagcaccuauaugcuuacaaacucugagcuguugucccucaucaaugauaugccuaucaccaacgaccaaaagaaacugaugucaaacaaugugcagauuguccgccagcagagcuacaguauaaugugcaucauuaaggaagagguuuuagccuaugugguacaacugccacucuacggcgugaucgauacgcccuguuggaaacuucauacuucuccucugugcacaaccaacacuaaggaaggcuccaauauauguuugacacgaaccgaccgugggugguacugcgauaacgcuggaagcgucucguuuuucccacaggccgagacguguaaggugcagucuaauagaguuuucugcgacaccaugaacucccuaacacugcccucagaagugaaucucugcaacauugauaucuucaauccuaaauaugacuguaagaucaugacaaguaaaaccgaugucagcuccucugugauuacaagccugggugcaaucguaucaugcuacggcaagacuaaauguaccgcuaguaacaagugcagggggauuauaaagacauuuuccaauggaugugacuauguuagcaacaaaggcguggacaccgucucuguggguaauacucuuuacuaugucaacaagcaagaggggcagucacuguacgugaaaggagagccaaucauuaauuucuaugauccguugguuuuucccagugacgaauuugaugccagcaucucccaggugaacgagaagaucaaccagucucucgcguuuauucggaaaucggacgaacuguuacacaauguaaacgucggcaagagcacgacaaauauaaugaucaccacuauuaucauugugaucauaguuauccugcuacuccugauugccgugggccuuuucuuguacugcaaggcacgcugaggacuaguguccaccugucccuccugggcugcuggauugucucguuuuccugccaaauaaacaggaucagcgcuuuacagaucuaaaaaaaaaaaaaaaaaaaaaaaaaaaaaaaaaaaaaaaaaaaaaaaaaaaaaaaaaaaaaaaaugcaucccccccccccccccccccccccccccccccaaaggcucuuuucagagccaccagaauu

SEQ ID NO: 19664 - RNA, 1829 nt, Artificial Sequence
  mRNA product Design e-3 comprising derived and/or modified sequence from HRSV(Memphis-37)__AIY60640.1__F-del_DSCav1_mut8 (opt4)
gggagacuuucccauucuguagcagaauuugguguugccuguggucuuggucccgcggagaagcuuaccauggagcugcccauccugaagaccaacgccaucaccaccauccuggccgccgugacccugugcuucgccagcagccagaacaucaccgaggaguucuaccagagcaccugcagcgccgugagcaagggcuaccugggcgcccugagaaccggcugguacaccagcgugaucaccaucgagcugagcaacaucaaggagaucaagugcaacggcaccgacgccaaggugaagcugaucaagcaggagcuggacaaguacaagaacgccgugaccgaccugcagcugcugaugcagagcacccccgccgccggcagcggcagcgccaucgccagcggcaucgccgugugcaaggugcugcaccuggagggcgaggugaacaagaucaagaacgcccugcugagcaccaacaaggccguggugagccugagcggcugcggcgugagcgugcugaccuucaaggugcuggaccugaagaacuacaucgacaagcagcugcugcccauccugaacaagcagagcugcagcauccccaacaucgagaccgugaucgaguuccagcagaagaacaacagacugcuggagaucaccagagaguucagcgugaacgccggcgugaccacccccgugagcaccuacaugcugaccaacagcgagcugcugagccugaucaacgacaugcccaucaccaacgaccagaagaagcugaugagcaacaacgugcagaucgugagacagcagagcuacagcaucaugugcaucaucaaggaggaggugcuggccuacguggugcagcugccccuguacggcgugaucgacacccccugcuggaagcugcacaccagcccccugugcaccaccaacaccaaggagggcagcaacaucugccugaccagaaccgacagaggcugguacugcgacaacgccggcagcgugagcuucuucccccaggccgagaccugcaaggugcagagcaacagaguguucugcgacaccaugaacagccugacccugcccagcgaggugaaccugugcaacaucgacaucuucaaccccaaguacgacugcaagaucaugaccagcaagaccgacgugagcagcagcgugaucaccagccugggcgccaucgugagcugcuacggcaagaccaagugcaccgccagcaacaagugcagaggcaucaucaagaccuucagcaacggcugcgacuacgugagcaacaagggcguggacaccgugagcgugggcaacacccuguacuacgugaacaagcaggagggccagagccuguacgugaagggcgagcccaucaucaacuucuacgacccccugguguuccccagcgacgaguucgacgccagcaucagccaggugaacgagaagaucaaccagagccuggccuucaucagaaagagcgacgagcugcugcacaacgugaacgugggcaagagcaccaccaacaucaugaucaccaccaucaucaucgugaucaucgugauccugcugcugcugaucgccgugggccuguuccuguacugcaaggccagaugaggacuaguguccaccugucccuccugggcugcuggauugucucguuuuccugccaaauaaacaggaucagcgcuuuacagaucuaaaaaaaaaaaaaaaaaaaaaaaaaaaaaaaaaaaaaaaaaaaaaaaaaaaaaaaaaaaaaaaaugcaucccccccccccccccccccccccccccccccaaaggcucuuuucagagccaccagaauu

SEQ ID NO: 19665 - RNA, 1829 nt, Artificial Sequence
  mRNA product Design e-3 comprising derived and/or modified sequence from HRSV(Memphis-37)__AIY60640.1__F-del_DSCav1_mut8 (opt5)
gggagacuuucccauucuguagcagaauuugguguugccuguggucuuggucccgcggagaagcuuaccauggagcugcccauccucaagaccaacgccauuacaacgauccuggcugccgugacccuuugcuucgcgagcucccagaauauuacagaagaguuuuaccaaucuaccuguagcgcugucuccaaaggcuaucugggggcccucagaacaggaugguacaccucuguuaucacaauugaacugagcaacaucaaggagaucaaaugcaauggcaccgacgccaaggugaaacuuauuaagcaggaacuggauaaguauaaaaacgcugugacggaccuccagcugcugaugcaguccaccccugccgcugggucuggaagcgccaucgcguccggcauugccgucuguaaggugcuccaccuggagggggagguuaauaaaaucaagaacgcccuucugagcacaaauaaagcuguggucucucucuccggaugcggcgugagcguucugaccuucaaggugcuugaucugaagaacuacauugacaaacaacuccugccgauccugaauaagcagucuuguuccauucccaacaucgaaacagucaucgaguuucagcagaaaaauaaccggcuccuggaaauuacccgcgaguucagcgugaaugcuggcgugacgacaccugucucuaccuauaugcuuacaaacuccgagcugcucagccugaucaaugauaugcccauuaccaacgaccaaaagaaacuuauguccaacaauguucagaucgugagacagcagucuuacagcauuaugugcaucaucaaggaagaggugcuggccuaugucgugcaacucccucuguacgggguuauugauacccccuguuggaaacugcauacauccccucucugcacgaccaacacaaaggaaggaagcaauaucugucugacccggacagaccgcggcugguacugcgauaacgcggggucuguguccuuuuucccgcaggccgagaccuguaagguccagagcaauagaguguuuugcgacacgaugaacucucuuacacugcccagcgaaguuaaucucugcaacauugauaucuucaauccuaaauaugacuguaagauuaugaccuccaaaaccgaugugucuagcuccgucaucacaagccugggagcuaucgugucuugcuacggcaagaccaaauguacagccuccaacaagugccgggggauuaucaagacguuuagcaauggaugugacuaugucucuaacaaaggcguggacaccguuuccgugggcaauacacuuuacuaugucaacaagcaagaggggcagagccuguacgugaaaggagagcccauuaucaauuucuaugauccucucguuuuucccuccgacgaguucgaugcuucuauuagccaggugaacgaaaagaucaaccagucccuggccuuuauucgcaaaucugacgaacugcuccacaaugucaacgugggcaagagcaccacaaauaucaugaucaccacgauuaucauugugaucauuguuauccugcuucugcucaucgccgucgggcuguuccuguacugcaaggcuagaugaggacuaguguccaccugucccuccugggcugcuggauugucucguuuuccugccaaauaaacaggaucagcgcuuuacagaucuaaaaaaaaaaaaaaaaaaaaaaaaaaaaaaaaaaaaaaaaaaaaaaaaaaaaaaaaaaaaaaaaugcaucccccccccccccccccccccccccccccccaaaggcucuuuucagagccaccagaauu

SEQ ID NO: 19666 - RNA, 1829 nt, Artificial Sequence
  mRNA product Design e-3 comprising derived and/or modified sequence from HRSV(Memphis-37)__AIY60640.1__F-del_DSCav1_mut8 (opt6)
gggagacuuucccauucuguagcagaauuugguguugccuguggucuuggucccgcggagaagcuuaccauggaacuacccauacuaaaaacaaacgcaauuacaacaauacuugccgcaguaaccuuaugcuuugccucaucccaaaacauaacagaagaauuuuaucaaucaacaugcuccgcaguaucaaaaggauaccuaggcgcucuaagaacaggaugguacacauccguaaucacaauagaacuauccaauauaaaagaaauaaaauguaauggaacagaugcaaaaguuaaauuaauaaaacaagaacuagacaaauacaaaaacgcaguuaccgaucuccaacuauuaaugcaaucaacaccagcugcaggaaguggaagcgccauagcaagcggaauagcagucugcaaaguauuacaucuugaaggcgaaguaaacaaaaucaaaaaugcccuccucucaacaaacaaagcuguaguaucccuaucaggaugcgguguaucuguucuuacauuuaaaguacucgaucuaaaaaacuacaucgauaaacaguuacuuccaauacucaacaaacaaucauguagcauaccaaacauagaaacaguaauagaauuucaacaaaaaaacaaucgacuacucgaaauaacuagagaauuuucuguaaacgcuggaguaaccacaccagugucuaccuauaugcuuacaaauagcgaacuccuaucacuaaucaaugacaugccaauaacaaaugaccagaaaaaacucaugucaaauaacguacaaauaguacgacaacaaagcuacuccauaaugugcauaaucaaagaagaaguauuagccuacguuguucaacuaccauuauauggaguuauagacacuccaugcuggaaauuacauacaagcccacucuguacaacaaacacaaaagaaggcucaaacauaugcuuaacaagaacagauagaggaugguacugcgauaacgcaggcucagucucauuuuuuccacaagccgaaaccugcaaaguacaaucaaauagaguuuuuugcgacacaaugaacucacucacucuaccaagugaaguaaaucucuguaauaucgacauauucaacccaaaauaugacugcaaaauaaugacaucuaaaaccgauguauccucaagcguaaucacaucauuaggagcuauaguuuccugcuacgguaaaacaaaaugcacagcauccaacaaaugucgcgguaucaucaaaacauucuccaacggaugugauuacguaucaaacaaaggugucgacaccguaagcguaggcaacacuuuauacuauguaaacaaacaagaaggacaaagucuauauguaaaaggagaaccaauaauaaacuucuaugacccccuaguauucccuuccgacgaauuugaugcaagcauuucacaaguuaacgaaaaaaucaaucaaucccuugcuuucauaagaaaaucagacgaauuacuacacaacguaaacguaggaaaaagcacaacaaauaucaugauuacaacaauaauaauuguaauaauaguaauacuccucuuacuuauagcagucggcuuauuccuuuacugcaaagcaagauaaggacuaguguccaccugucccuccugggcugcuggauugucucguuuuccugccaaauaaacaggaucagcgcuuuacagaucuaaaaaaaaaaaaaaaaaaaaaaaaaaaaaaaaaaaaaaaaaaaaaaaaaaaaaaaaaaaaaaaaugcaucccccccccccccccccccccccccccccccaaaggcucuuuucagagccaccagaauu

SEQ ID NO: 19667 - RNA, 1829 nt, Artificial Sequence
  mRNA product Design e-3 comprising derived and/or modified sequence from HRSV(Memphis-37)__AIY60640.1__F-del_DSCav1_mut8 (opt11)
gggagacuuucccauucuguagcagaauuugguguugccuguggucuuggucccgcggagaagcuuaccauggaacuccccauccuaaaaaccaacgcaaucaccaccauccucgccgccguaacacucugcuuugcaagcucccaaaacaucaccgaagaauuuuaccaaucuaccugcagcgccguaucuaaaggauaccuaggagcccucagaaccgguugguacaccucugucaucacaauagaacucuccaacaucaaagaaaucaaaugcaacggcaccgacgccaaagucaaacucaucaaacaagaacucgacaaauauaaaaacgccguaaccgaccuccaacuccucaugcaauccacccccgccgccggcaguggcuccgcuaucgccuccggaaucgccguuugcaaaguccugcaccuagaaggcgaagucaacaaaaucaaaaacgcccugcucucaaccaacaaagcugucguaagccucuccggcugcggagucuccguccuuaccuucaaaguacucgaccuuaaaaacuacaucgacaaacaacuucuccccauacucaauaaacaauccugcuccauacccaacaucgaaacagucaucgaguuccaacagaaaaauaaccgccuccucgaaauaacccgcgaguucuccgucaacgcaggcgucaccaccccagucuccaccuacaugcugacaaacuccgaacuccuaucccucaucaacgacaugcccaucaccaacgaccaaaagaaacucaugagcaauaacguccaaaucguacgacaacaauccuacagcaucauguguaucaucaaagaagaaguacucgccuacgucguccaacucccacuauacggcgucaucgacacaccaugcuggaaacuucacaccuccccacucugcaccacaaacacaaaagaaggcuccaacaucugccuuacccgaaccgaccgcgggugguacugcgacaacgccggaucagucucguucuuuccccaagccgaaaccugcaaaguacaaucaaaucgcgucuucugcgacaccaugaacuccuuaacacuaccauccgaaguaaaccucugcaacauagacaucuucaacccaaaauacgacugcaaaaucaugaccuccaaaaccgacguauccuccuccguaaucaccagccucggcgcaauagucucaugcuacggcaaaaccaaaugcaccgccuccaacaaaugccgcggcaucauaaaaacuuucucuaacggaugcgacuacgucagcaacaaaggcgucgacaccguauccguagguaauacacuuuacuacgucaauaaacaagaaggccaaucccucuacgucaaaggagaacccaucauaaacuucuacgacccccucgucuuccccuccgacgaguucgacgccuccaucagccaggucaacgaaaagaucaaccaaucacucgccuucauccgcaaaagcgacgaacuccuccacaacguaaacgucggcaaauccacaaccaacauaaugaucaccacuaucaucaucgugauaaucgucauuuuacuucuccucaucgccguaggccucuuccuauacugcaaagcccgcuaaggacuaguguccaccugucccuccugggcugcuggauugucucguuuuccugccaaauaaacaggaucagcgcuuuacagaucuaaaaaaaaaaaaaaaaaaaaaaaaaaaaaaaaaaaaaaaaaaaaaaaaaaaaaaaaaaaaaaaaugcaucccccccccccccccccccccccccccccccaaaggcucuuuucagagccaccagaauu

SEQ ID NO: 19668 - RNA, 1883 nt, Artificial Sequence
  mRNA product Design e-4 comprising derived and/or modified sequence from HRSV(Memphis-37)__AIY60640.1__F-del_DSCav1_mut8 (opt1)
gggagacuccugucgggcggaaguaggaggaguagaguuuaaaaacaguacucuuuuuccgguucgggacguaguugaagcaacgacaagccggauaaccgcucuugagacaggaagcuuaccauggagcugcccauccucaagaccaacgccaucaccacgauccuggccgcggugacccugugcuucgccagcucccagaacaucaccgaggaguucuaccagagcacgugcuccgccgucagcaagggcuaccucggcgcccugcgcaccgggugguacaccagcgugaucaccaucgagcuguccaacaucaaggagaucaagugcaacggcaccgacgccaaggugaagcucaucaagcaggagcuggacaaguacaagaacgcggucacggaccugcagcuccugaugcagagcaccccggccgccggcuccgggagcgcgaucgccuccggcaucgccgucugcaaggugcugcaccucgagggcgaggugaacaagaucaagaacgcccugcuguccaccaacaaggccgucgugagccucuccggcugcggggugagcguccugaccuucaaggugcuggaccucaagaacuacaucgacaagcagcugcugcccauccugaacaagcagagcugcuccauccccaacaucgagaccgucaucgaguuccagcagaagaacaaccgccuccuggagaucacgcgggaguucagcgugaacgcgggcgugaccacccccgucuccaccuacaugcugacgaacagcgagcuccugucccugaucaacgacaugccgaucaccaacgaccagaagaagcucaugagcaacaacgugcagaucgugcgccagcaguccuacagcaucaugugcaucaucaaggaggagguccuggccuacguggugcagcugccccucuacggggucaucgacacccccugcuggaagcugcacaccagcccccugugcacgaccaacaccaaggagggcuccaacaucugccucacccggacggaccgcgggugguacugcgacaacgccggcagcguguccuucuucccgcaggccgagaccugcaagguccagagcaaccggguguucugcgacaccaugaacucccugacccugcccagcgaggugaaccucugcaacaucgacaucuucaaccccaaguacgacugcaagaucaugacguccaagaccgacgucagcuccagcgugaucaccucccugggcgccaucgugagcugcuacgggaagaccaagugcacggcgagcaacaagugccgcggcaucaucaagaccuucuccaacgggugcgacuacgucagcaacaagggcguggacaccguguccgucggcaacacccuguacuacgugaacaagcaggagggccagagccucuacgugaagggggagcccaucaucaacuucuacgacccgcuggucuuccccuccgacgaguucgacgccagcaucucccaggugaacgagaagaucaaccagagccuggccuucauccggaaguccgacgagcuccugcacaacgugaacgucggcaagagcaccacgaacaucaugaucaccaccaucaucaucgugaucaucgugauccugcugcuccugaucgccgucgggcuguuccucuacugcaaggcccgcugaggacuaguguccaccugucccuccugggcugcuggauugucucguuuuccugccaaauaaacaggaucagcgcuuuacagaucuaaaaaaaaaaaaaaaaaaaaaaaaaaaaaaaaaaaaaaaaaaaaaaaaaaaaaaaaaaaaaaaaugcaucccccccccccccccccccccccccccccccaaaggcucuuuucagagccaccagaauu

SEQ ID NO: 19669 - RNA, 1883 nt, Artificial Sequence
  mRNA product Design e-4 comprising derived and/or modified sequence from HRSV(Memphis-37)__AIY60640.1__F-del_DSCav1_mut8 (opt1)
gggagacuccugucgggcggaaguaggaggaguagaguuuaaaaacaguacucuuuuuccgguucgggacguaguugaagcaacgacaagccggauaaccgcucuugagacaggaagcuuaccauggagcugcccauccucaagaccaacgccaucaccacgauccuggccgcggugacccugugcuucgccagcucccagaacaucaccgaggaguucuaccagagcacgugcuccgccgucagcaagggcuaccucggggcccugcgcaccggcugguacaccuccgugaucaccaucgagcugagcaacaucaaggagaucaagugcaacgggaccgacgccaaggugaagcucaucaagcaggagcuggacaaguacaagaacgcggucacggaccugcagcuccugaugcaguccaccccggccgccggcagcggguccgccaucgcgagcggcaucgccgugugcaaggugcugcaccucgagggcgaggucaacaagaucaagaacgcccugcuguccaccaacaaggccguggugagccucuccgggugcggcgucagcgugcugaccuucaaggugcuggaccucaagaacuacaucgacaagcagcugcugcccauccucaacaagcaguccugcagcauccccaacaucgagacggucaucgaguuccagcagaagaacaaccggcugcuggagaucacccgcgaguucuccgugaacgccggggugaccacccccgucagcacguacaugcucaccaacuccgagcugcugagccucaucaacgacaugccgaucaccaacgaccagaagaagcugaugagcaacaacgugcagaucgugcggcagcaguccuacagcaucaugugcaucaucaaggaggagguccuggcguacguggugcagcucccccuguacggcgucaucgacacccccugcuggaagcugcacacgagcccccucugcaccaccaacaccaaggagggguccaacaucugccugacgcgcaccgaccggggcugguacugcgacaacgccggcuccgugagcuucuucccgcaggccgagaccugcaaggugcaguccaaccgcgucuucugcgacaccaugaacagccugacgcuccccuccgaggugaaccugugcaacaucgacaucuucaaccccaaguacgacugcaagaucaugaccagcaagaccgacgucuccagcuccgugaucaccagccugggggccaucguguccugcuacggcaagacgaagugcaccgccagcaacaagugccgggggaucaucaagaccuucuccaacggcugcgacuacgucagcaacaagggcguggacaccguguccgucgggaacacgcucuacuacgugaacaagcaggagggccagagccuguacgugaagggggagcccaucaucaacuucuacgacccgcuggucuuccccagcgacgaguucgacgcguccaucagccaggugaacgagaagaucaaccagucccucgccuucauccgcaagagcgacgagcugcugcacaacgugaacgucggcaaguccaccaccaacaucaugaucaccaccaucaucaucgugaucaucgugauccuccugcugcucaucgccgucgggcuguuccuguacugcaaggcccggugaggacuaguguccaccugucccuccugggcugcuggauugucucguuuuccugccaaauaaacaggaucagcgcuuuacagaucuaaaaaaaaaaaaaaaaaaaaaaaaaaaaaaaaaaaaaaaaaaaaaaaaaaaaaaaaaaaaaaaaugcaucccccccccccccccccccccccccccccccaaaggcucuuuucagagccaccagaauu

SEQ ID NO: 19670 - RNA, 1883 nt, Artificial Sequence
  mRNA product Design e-4 comprising derived and/or modified sequence from HRSV(Memphis-37)__AIY60640.1__F-del_DSCav1_mut8 (opt2)
gggagacuccugucgggcggaaguaggaggaguagaguuuaaaaacaguacucuuuuuccgguucgggacguaguugaagcaacgacaagccggauaaccgcucuugagacaggaagcuuaccauggagcuccccauccucaagaccaacgccaucaccaccauccucgccgccgucacccucugcuucgccuccucccagaacaucaccgaggaguucuaccaguccaccugcuccgccgucuccaagggcuaccucggcgcccuccgcaccggcugguacaccuccgucaucaccaucgagcucuccaacaucaaggagaucaagugcaacggcaccgacgccaaggucaagcucaucaagcaggagcucgacaaguacaagaacgccgucaccgaccuccagcuccucaugcaguccacccccgccgccggcuccggcuccgccaucgccuccggcaucgccgucugcaagguccuccaccucgagggcgaggucaacaagaucaagaacgcccuccucuccaccaacaaggccgucgucucccucuccggcugcggcgucuccguccucaccuucaagguccucgaccucaagaacuacaucgacaagcagcuccuccccauccucaacaagcaguccugcuccauccccaacaucgagaccgucaucgaguuccagcagaagaacaaccgccuccucgagaucacccgcgaguucuccgucaacgccggcgucaccacccccgucuccaccuacaugcucaccaacuccgagcuccucucccucaucaacgacaugcccaucaccaacgaccagaagaagcucauguccaacaacguccagaucguccgccagcaguccuacuccaucaugugcaucaucaaggaggagguccucgccuacgucguccagcucccccucuacggcgucaucgacacccccugcuggaagcuccacaccuccccccucugcaccaccaacaccaaggagggcuccaacaucugccucacccgcaccgaccgcggcugguacugcgacaacgccggcuccgucuccuucuucccccaggccgagaccugcaagguccaguccaaccgcgucuucugcgacaccaugaacucccucacccuccccuccgaggucaaccucugcaacaucgacaucuucaaccccaaguacgacugcaagaucaugaccuccaagaccgacgucuccuccuccgucaucaccucccucggcgccaucgucuccugcuacggcaagaccaagugcaccgccuccaacaagugccgcggcaucaucaagaccuucuccaacggcugcgacuacgucuccaacaagggcgucgacaccgucuccgucggcaacacccucuacuacgucaacaagcaggagggccagucccucuacgucaagggcgagcccaucaucaacuucuacgacccccucgucuuccccuccgacgaguucgacgccuccaucucccaggucaacgagaagaucaaccagucccucgccuucauccgcaaguccgacgagcuccuccacaacgucaacgucggcaaguccaccaccaacaucaugaucaccaccaucaucaucgucaucaucgucauccuccuccuccucaucgccgucggccucuuccucuacugcaaggcccgcugaggacuaguguccaccugucccuccugggcugcuggauugucucguuuuccugccaaauaaacaggaucagcgcuuuacagaucuaaaaaaaaaaaaaaaaaaaaaaaaaaaaaaaaaaaaaaaaaaaaaaaaaaaaaaaaaaaaaaaaugcaucccccccccccccccccccccccccccccccaaaggcucuuuucagagccaccagaauu

SEQ ID NO: 19671 - RNA, 1883 nt, Artificial Sequence
  mRNA product Design e-4 comprising derived and/or modified sequence from HRSV(Memphis-37)__AIY60640.1__F-del_DSCav1_mut8 (opt3)
gggagacuccugucgggcggaaguaggaggaguagaguuuaaaaacaguacucuuuuuccgguucgggacguaguugaagcaacgacaagccggauaaccgcucuugagacaggaagcuuaccauggagcugcccauccucaagaccaacgccauuacaacuauacuugcugcagugacgcugugcuucgccagcucccagaauaucaccgaagaguuuuaccaaucuacauguucagcggucaguaaaggcuauuugggggcuuuaagaacuggaugguacaccagcguuauuacaaucgaacuguccaacauuaaggagaucaaaugcaaugguaccgacgccaaggugaaacuaauaaagcaggaacucgauaaguauaaaaacgcaguaacugaccugcagcuucugaugcagucuacuccugccgcuggcucggggucagcaaucgccagcggaauugcuguguguaaggucuugcaccucgagggcgaggugaauaaaaucaagaacgcccugcugaguaccaauaaagcgguugugucccucucugguugcggggucagcguguuaacguucaagguacuggaucuuaagaacuacauugacaaacaauugcugccaauccuaaauaagcaguccuguucaauaccgaacauugaaacuguuaucgaguuucagcagaaaaauaacaggcuccuggaaauuacccgggaguucagugugaaugcaggagucacaacucccgugagcaccuauaugcuuacaaacucugagcuguugucccucaucaaugauaugccuaucaccaacgaccaaaagaaacugaugucaaacaaugugcagauuguccgccagcagagcuacaguauaaugugcaucauuaaggaagagguuuuagccuaugugguacaacugccacucuacggcgugaucgauacgcccuguuggaaacuucauacuucuccucugugcacaaccaacacuaaggaaggcuccaauauauguuugacacgaaccgaccgugggugguacugcgauaacgcuggaagcgucucguuuuucccacaggccgagacguguaaggugcagucuaauagaguuuucugcgacaccaugaacucccuaacacugcccucagaagugaaucucugcaacauugauaucuucaauccuaaauaugacuguaagaucaugacaaguaaaaccgaugucagcuccucugugauuacaagccugggugcaaucguaucaugcuacggcaagacuaaauguaccgcuaguaacaagugcagggggauuauaaagacauuuuccaauggaugugacuauguuagcaacaaaggcguggacaccgucucuguggguaauacucuuuacuaugucaacaagcaagaggggcagucacuguacgugaaaggagagccaaucauuaauuucuaugauccguugguuuuucccagugacgaauuugaugccagcaucucccaggugaacgagaagaucaaccagucucucgcguuuauucggaaaucggacgaacuguuacacaauguaaacgucggcaagagcacgacaaauauaaugaucaccacuauuaucauugugaucauaguuauccugcuacuccugauugccgugggccuuuucuuguacugcaaggcacgcugaggacuaguguccaccugucccuccugggcugcuggauugucucguuuuccugccaaauaaacaggaucagcgcuuuacagaucuaaaaaaaaaaaaaaaaaaaaaaaaaaaaaaaaaaaaaaaaaaaaaaaaaaaaaaaaaaaaaaaaugcaucccccccccccccccccccccccccccccccaaaggcucuuuucagagccaccagaauu

SEQ ID NO: 19672 - RNA, 1883 nt, Artificial Sequence
  mRNA product Design e-4 comprising derived and/or modified sequence from HRSV(Memphis-37)__AIY60640.1__F-del_DSCav1_mut8 (opt4)
gggagacuccugucgggcggaaguaggaggaguagaguuuaaaaacaguacucuuuuuccgguucgggacguaguugaagcaacgacaagccggauaaccgcucuugagacaggaagcuuaccauggagcugcccauccugaagaccaacgccaucaccaccauccuggccgccgugacccugugcuucgccagcagccagaacaucaccgaggaguucuaccagagcaccugcagcgccgugagcaagggcuaccugggcgcccugagaaccggcugguacaccagcgugaucaccaucgagcugagcaacaucaaggagaucaagugcaacggcaccgacgccaaggugaagcugaucaagcaggagcuggacaaguacaagaacgccgugaccgaccugcagcugcugaugcagagcacccccgccgccggcagcggcagcgccaucgccagcggcaucgccgugugcaaggugcugcaccuggagggcgaggugaacaagaucaagaacgcccugcugagcaccaacaaggccguggugagccugagcggcugcggcgugagcgugcugaccuucaaggugcuggaccugaagaacuacaucgacaagcagcugcugcccauccugaacaagcagagcugcagcauccccaacaucgagaccgugaucgaguuccagcagaagaacaacagacugcuggagaucaccagagaguucagcgugaacgccggcgugaccacccccgugagcaccuacaugcugaccaacagcgagcugcugagccugaucaacgacaugcccaucaccaacgaccagaagaagcugaugagcaacaacgugcagaucgugagacagcagagcuacagcaucaugugcaucaucaaggaggaggugcuggccuacguggugcagcugccccuguacggcgugaucgacacccccugcuggaagcugcacaccagcccccugugcaccaccaacaccaaggagggcagcaacaucugccugaccagaaccgacagaggcugguacugcgacaacgccggcagcgugagcuucuucccccaggccgagaccugcaaggugcagagcaacagaguguucugcgacaccaugaacagccugacccugcccagcgaggugaaccugugcaacaucgacaucuucaaccccaaguacgacugcaagaucaugaccagcaagaccgacgugagcagcagcgugaucaccagccugggcgccaucgugagcugcuacggcaagaccaagugcaccgccagcaacaagugcagaggcaucaucaagaccuucagcaacggcugcgacuacgugagcaacaagggcguggacaccgugagcgugggcaacacccuguacuacgugaacaagcaggagggccagagccuguacgugaagggcgagcccaucaucaacuucuacgacccccugguguuccccagcgacgaguucgacgccagcaucagccaggugaacgagaagaucaaccagagccuggccuucaucagaaagagcgacgagcugcugcacaacgugaacgugggcaagagcaccaccaacaucaugaucaccaccaucaucaucgugaucaucgugauccugcugcugcugaucgccgugggccuguuccuguacugcaaggccagaugaggacuaguguccaccugucccuccugggcugcuggauugucucguuuuccugccaaauaaacaggaucagcgcuuuacagaucuaaaaaaaaaaaaaaaaaaaaaaaaaaaaaaaaaaaaaaaaaaaaaaaaaaaaaaaaaaaaaaaaugcaucccccccccccccccccccccccccccccccaaaggcucuuuucagagccaccagaauu

SEQ ID NO: 19673 - RNA, 1883 nt, Artificial Sequence
  mRNA product Design e-4 comprising derived and/or modified sequence from HRSV(Memphis-37)__AIY60640.1__F-del_DSCav1_mut8 (opt5)
gggagacuccugucgggcggaaguaggaggaguagaguuuaaaaacaguacucuuuuuccgguucgggacguaguugaagcaacgacaagccggauaaccgcucuugagacaggaagcuuaccauggagcugcccauccucaagaccaacgccauuacaacgauccuggcugccgugacccuuugcuucgcgagcucccagaauauuacagaagaguuuuaccaaucuaccuguagcgcugucuccaaaggcuaucugggggcccucagaacaggaugguacaccucuguuaucacaauugaacugagcaacaucaaggagaucaaaugcaauggcaccgacgccaaggugaaacuuauuaagcaggaacuggauaaguauaaaaacgcugugacggaccuccagcugcugaugcaguccaccccugccgcugggucuggaagcgccaucgcguccggcauugccgucuguaaggugcuccaccuggagggggagguuaauaaaaucaagaacgcccuucugagcacaaauaaagcuguggucucucucuccggaugcggcgugagcguucugaccuucaaggugcuugaucugaagaacuacauugacaaacaacuccugccgauccugaauaagcagucuuguuccauucccaacaucgaaacagucaucgaguuucagcagaaaaauaaccggcuccuggaaauuacccgcgaguucagcgugaaugcuggcgugacgacaccugucucuaccuauaugcuuacaaacuccgagcugcucagccugaucaaugauaugcccauuaccaacgaccaaaagaaacuuauguccaacaauguucagaucgugagacagcagucuuacagcauuaugugcaucaucaaggaagaggugcuggccuaugucgugcaacucccucuguacgggguuauugauacccccuguuggaaacugcauacauccccucucugcacgaccaacacaaaggaaggaagcaauaucugucugacccggacagaccgcggcugguacugcgauaacgcggggucuguguccuuuuucccgcaggccgagaccuguaagguccagagcaauagaguguuuugcgacacgaugaacucucuuacacugcccagcgaaguuaaucucugcaacauugauaucuucaauccuaaauaugacuguaagauuaugaccuccaaaaccgaugugucuagcuccgucaucacaagccugggagcuaucgugucuugcuacggcaagaccaaauguacagccuccaacaagugccgggggauuaucaagacguuuagcaauggaugugacuaugucucuaacaaaggcguggacaccguuuccgugggcaauacacuuuacuaugucaacaagcaagaggggcagagccuguacgugaaaggagagcccauuaucaauuucuaugauccucucguuuuucccuccgacgaguucgaugcuucuauuagccaggugaacgaaaagaucaaccagucccuggccuuuauucgcaaaucugacgaacugcuccacaaugucaacgugggcaagagcaccacaaauaucaugaucaccacgauuaucauugugaucauuguuauccugcuucugcucaucgccgucgggcuguuccuguacugcaaggcuagaugaggacuaguguccaccugucccuccugggcugcuggauugucucguuuuccugccaaauaaacaggaucagcgcuuuacagaucuaaaaaaaaaaaaaaaaaaaaaaaaaaaaaaaaaaaaaaaaaaaaaaaaaaaaaaaaaaaaaaaaugcaucccccccccccccccccccccccccccccccaaaggcucuuuucagagccaccagaauu

SEQ ID NO: 19674 - RNA, 1883 nt, Artificial Sequence
  mRNA product Design e-4 comprising derived and/or modified sequence from HRSV(Memphis-37)__AIY60640.1__F-del_DSCav1_mut8 (opt6)
gggagacuccugucgggcggaaguaggaggaguagaguuuaaaaacaguacucuuuuuccgguucgggacguaguugaagcaacgacaagccggauaaccgcucuugagacaggaagcuuaccauggaacuacccauacuaaaaacaaacgcaauuacaacaauacuugccgcaguaaccuuaugcuuugccucaucccaaaacauaacagaagaauuuuaucaaucaacaugcuccgcaguaucaaaaggauaccuaggcgcucuaagaacaggaugguacacauccguaaucacaauagaacuauccaauauaaaagaaauaaaauguaauggaacagaugcaaaaguuaaauuaauaaaacaagaacuagacaaauacaaaaacgcaguuaccgaucuccaacuauuaaugcaaucaacaccagcugcaggaaguggaagcgccauagcaagcggaauagcagucugcaaaguauuacaucuugaaggcgaaguaaacaaaaucaaaaaugcccuccucucaacaaacaaagcuguaguaucccuaucaggaugcgguguaucuguucuuacauuuaaaguacucgaucuaaaaaacuacaucgauaaacaguuacuuccaauacucaacaaacaaucauguagcauaccaaacauagaaacaguaauagaauuucaacaaaaaaacaaucgacuacucgaaauaacuagagaauuuucuguaaacgcuggaguaaccacaccagugucuaccuauaugcuuacaaauagcgaacuccuaucacuaaucaaugacaugccaauaacaaaugaccagaaaaaacucaugucaaauaacguacaaauaguacgacaacaaagcuacuccauaaugugcauaaucaaagaagaaguauuagccuacguuguucaacuaccauuauauggaguuauagacacuccaugcuggaaauuacauacaagcccacucuguacaacaaacacaaaagaaggcucaaacauaugcuuaacaagaacagauagaggaugguacugcgauaacgcaggcucagucucauuuuuuccacaagccgaaaccugcaaaguacaaucaaauagaguuuuuugcgacacaaugaacucacucacucuaccaagugaaguaaaucucuguaauaucgacauauucaacccaaaauaugacugcaaaauaaugacaucuaaaaccgauguauccucaagcguaaucacaucauuaggagcuauaguuuccugcuacgguaaaacaaaaugcacagcauccaacaaaugucgcgguaucaucaaaacauucuccaacggaugugauuacguaucaaacaaaggugucgacaccguaagcguaggcaacacuuuauacuauguaaacaaacaagaaggacaaagucuauauguaaaaggagaaccaauaauaaacuucuaugacccccuaguauucccuuccgacgaauuugaugcaagcauuucacaaguuaacgaaaaaaucaaucaaucccuugcuuucauaagaaaaucagacgaauuacuacacaacguaaacguaggaaaaagcacaacaaauaucaugauuacaacaauaauaauuguaauaauaguaauacuccucuuacuuauagcagucggcuuauuccuuuacugcaaagcaagauaaggacuaguguccaccugucccuccugggcugcuggauugucucguuuuccugccaaauaaacaggaucagcgcuuuacagaucuaaaaaaaaaaaaaaaaaaaaaaaaaaaaaaaaaaaaaaaaaaaaaaaaaaaaaaaaaaaaaaaaugcaucccccccccccccccccccccccccccccccaaaggcucuuuucagagccaccagaauu

SEQ ID NO: 19675 - RNA, 1883 nt, Artificial Sequence
  mRNA product Design e-4 comprising derived and/or modified sequence from HRSV(Memphis-37)__AIY60640.1__F-del_DSCav1_mut8 (opt11)
gggagacuccugucgggcggaaguaggaggaguagaguuuaaaaacaguacucuuuuuccgguucgggacguaguugaagcaacgacaagccggauaaccgcucuugagacaggaagcuuaccauggaacuccccauccuaaaaaccaacgcaaucaccaccauccucgccgccguaacacucugcuuugcaagcucccaaaacaucaccgaagaauuuuaccaaucuaccugcagcgccguaucuaaaggauaccuaggagcccucagaaccgguugguacaccucugucaucacaauagaacucuccaacaucaaagaaaucaaaugcaacggcaccgacgccaaagucaaacucaucaaacaagaacucgacaaauauaaaaacgccguaaccgaccuccaacuccucaugcaauccacccccgccgccggcaguggcuccgcuaucgccuccggaaucgccguuugcaaaguccugcaccuagaaggcgaagucaacaaaaucaaaaacgcccugcucucaaccaacaaagcugucguaagccucuccggcugcggagucuccguccuuaccuucaaaguacucgaccuuaaaaacuacaucgacaaacaacuucuccccauacucaauaaacaauccugcuccauacccaacaucgaaacagucaucgaguuccaacagaaaaauaaccgccuccucgaaauaacccgcgaguucuccgucaacgcaggcgucaccaccccagucuccaccuacaugcugacaaacuccgaacuccuaucccucaucaacgacaugcccaucaccaacgaccaaaagaaacucaugagcaauaacguccaaaucguacgacaacaauccuacagcaucauguguaucaucaaagaagaaguacucgccuacgucguccaacucccacuauacggcgucaucgacacaccaugcuggaaacuucacaccuccccacucugcaccacaaacacaaaagaaggcuccaacaucugccuuacccgaaccgaccgcgggugguacugcgacaacgccggaucagucucguucuuuccccaagccgaaaccugcaaaguacaaucaaaucgcgucuucugcgacaccaugaacuccuuaacacuaccauccgaaguaaaccucugcaacauagacaucuucaacccaaaauacgacugcaaaaucaugaccuccaaaaccgacguauccuccuccguaaucaccagccucggcgcaauagucucaugcuacggcaaaaccaaaugcaccgccuccaacaaaugccgcggcaucauaaaaacuuucucuaacggaugcgacuacgucagcaacaaaggcgucgacaccguauccguagguaauacacuuuacuacgucaauaaacaagaaggccaaucccucuacgucaaaggagaacccaucauaaacuucuacgacccccucgucuuccccuccgacgaguucgacgccuccaucagccaggucaacgaaaagaucaaccaaucacucgccuucauccgcaaaagcgacgaacuccuccacaacguaaacgucggcaaauccacaaccaacauaaugaucaccacuaucaucaucgugauaaucgucauuuuacuucuccucaucgccguaggccucuuccuauacugcaaagcccgcuaaggacuaguguccaccugucccuccugggcugcuggauugucucguuuuccugccaaauaaacaggaucagcgcuuuacagaucuaaaaaaaaaaaaaaaaaaaaaaaaaaaaaaaaaaaaaaaaaaaaaaaaaaaaaaaaaaaaaaaaugcaucccccccccccccccccccccccccccccccaaaggcucuuuucagagccaccagaauu

SEQ ID NO: 19676 - RNA, 1850 nt, Artificial Sequence
  mRNA product Design e-5 comprising derived and/or modified sequence from HRSV(Memphis-37)__AIY60640.1__F-del_DSCav1_mut8 (opt1)
gggagagcggcucggccauuuugucccagucaguccggaggcugcggcugcagaaguaccgccugcggaguaacugcaaagaagcuuaccauggagcugcccauccucaagaccaacgccaucaccacgauccuggccgcggugacccugugcuucgccagcucccagaacaucaccgaggaguucuaccagagcacgugcuccgccgucagcaagggcuaccucggcgcccugcgcaccgggugguacaccagcgugaucaccaucgagcuguccaacaucaaggagaucaagugcaacggcaccgacgccaaggugaagcucaucaagcaggagcuggacaaguacaagaacgcggucacggaccugcagcuccugaugcagagcaccccggccgccggcuccgggagcgcgaucgccuccggcaucgccgucugcaaggugcugcaccucgagggcgaggugaacaagaucaagaacgcccugcuguccaccaacaaggccgucgugagccucuccggcugcggggugagcguccugaccuucaaggugcuggaccucaagaacuacaucgacaagcagcugcugcccauccugaacaagcagagcugcuccauccccaacaucgagaccgucaucgaguuccagcagaagaacaaccgccuccuggagaucacgcgggaguucagcgugaacgcgggcgugaccacccccgucuccaccuacaugcugacgaacagcgagcuccugucccugaucaacgacaugccgaucaccaacgaccagaagaagcucaugagcaacaacgugcagaucgugcgccagcaguccuacagcaucaugugcaucaucaaggaggagguccuggccuacguggugcagcugccccucuacggggucaucgacacccccugcuggaagcugcacaccagcccccugugcacgaccaacaccaaggagggcuccaacaucugccucacccggacggaccgcgggugguacugcgacaacgccggcagcguguccuucuucccgcaggccgagaccugcaagguccagagcaaccggguguucugcgacaccaugaacucccugacccugcccagcgaggugaaccucugcaacaucgacaucuucaaccccaaguacgacugcaagaucaugacguccaagaccgacgucagcuccagcgugaucaccucccugggcgccaucgugagcugcuacgggaagaccaagugcacggcgagcaacaagugccgcggcaucaucaagaccuucuccaacgggugcgacuacgucagcaacaagggcguggacaccguguccgucggcaacacccuguacuacgugaacaagcaggagggccagagccucuacgugaagggggagcccaucaucaacuucuacgacccgcuggucuuccccuccgacgaguucgacgccagcaucucccaggugaacgagaagaucaaccagagccuggccuucauccggaaguccgacgagcuccugcacaacgugaacgucggcaagagcaccacgaacaucaugaucaccaccaucaucaucgugaucaucgugauccugcugcuccugaucgccgucgggcuguuccucuacugcaaggcccgcugaggacuaguguccaccugucccuccugggcugcuggauugucucguuuuccugccaaauaaacaggaucagcgcuuuacagaucuaaaaaaaaaaaaaaaaaaaaaaaaaaaaaaaaaaaaaaaaaaaaaaaaaaaaaaaaaaaaaaaaugcaucccccccccccccccccccccccccccccccaaaggcucuuuucagagccaccagaauu

SEQ ID NO: 19677 - RNA, 1850 nt, Artificial Sequence
  mRNA product Design e-5 comprising derived and/or modified sequence from HRSV(Memphis-37)__AIY60640.1__F-del_DSCav1_mut8 (opt1)
gggagagcggcucggccauuuugucccagucaguccggaggcugcggcugcagaaguaccgccugcggaguaacugcaaagaagcuuaccauggagcugcccauccucaagaccaacgccaucaccacgauccuggccgcggugacccugugcuucgccagcucccagaacaucaccgaggaguucuaccagagcacgugcuccgccgucagcaagggcuaccucggggcccugcgcaccggcugguacaccuccgugaucaccaucgagcugagcaacaucaaggagaucaagugcaacgggaccgacgccaaggugaagcucaucaagcaggagcuggacaaguacaagaacgcggucacggaccugcagcuccugaugcaguccaccccggccgccggcagcggguccgccaucgcgagcggcaucgccgugugcaaggugcugcaccucgagggcgaggucaacaagaucaagaacgcccugcuguccaccaacaaggccguggugagccucuccgggugcggcgucagcgugcugaccuucaaggugcuggaccucaagaacuacaucgacaagcagcugcugcccauccucaacaagcaguccugcagcauccccaacaucgagacggucaucgaguuccagcagaagaacaaccggcugcuggagaucacccgcgaguucuccgugaacgccggggugaccacccccgucagcacguacaugcucaccaacuccgagcugcugagccucaucaacgacaugccgaucaccaacgaccagaagaagcugaugagcaacaacgugcagaucgugcggcagcaguccuacagcaucaugugcaucaucaaggaggagguccuggcguacguggugcagcucccccuguacggcgucaucgacacccccugcuggaagcugcacacgagcccccucugcaccaccaacaccaaggagggguccaacaucugccugacgcgcaccgaccggggcugguacugcgacaacgccggcuccgugagcuucuucccgcaggccgagaccugcaaggugcaguccaaccgcgucuucugcgacaccaugaacagccugacgcuccccuccgaggugaaccugugcaacaucgacaucuucaaccccaaguacgacugcaagaucaugaccagcaagaccgacgucuccagcuccgugaucaccagccugggggccaucguguccugcuacggcaagacgaagugcaccgccagcaacaagugccgggggaucaucaagaccuucuccaacggcugcgacuacgucagcaacaagggcguggacaccguguccgucgggaacacgcucuacuacgugaacaagcaggagggccagagccuguacgugaagggggagcccaucaucaacuucuacgacccgcuggucuuccccagcgacgaguucgacgcguccaucagccaggugaacgagaagaucaaccagucccucgccuucauccgcaagagcgacgagcugcugcacaacgugaacgucggcaaguccaccaccaacaucaugaucaccaccaucaucaucgugaucaucgugauccuccugcugcucaucgccgucgggcuguuccuguacugcaaggcccggugaggacuaguguccaccugucccuccugggcugcuggauugucucguuuuccugccaaauaaacaggaucagcgcuuuacagaucuaaaaaaaaaaaaaaaaaaaaaaaaaaaaaaaaaaaaaaaaaaaaaaaaaaaaaaaaaaaaaaaaugcaucccccccccccccccccccccccccccccccaaaggcucuuuucagagccaccagaauu

SEQ ID NO: 19678 - RNA, 1850 nt, Artificial Sequence
  mRNA product Design e-5 comprising derived and/or modified sequence from HRSV(Memphis-37)__AIY60640.1__F-del_DSCav1_mut8 (opt2)
gggagagcggcucggccauuuugucccagucaguccggaggcugcggcugcagaaguaccgccugcggaguaacugcaaagaagcuuaccauggagcuccccauccucaagaccaacgccaucaccaccauccucgccgccgucacccucugcuucgccuccucccagaacaucaccgaggaguucuaccaguccaccugcuccgccgucuccaagggcuaccucggcgcccuccgcaccggcugguacaccuccgucaucaccaucgagcucuccaacaucaaggagaucaagugcaacggcaccgacgccaaggucaagcucaucaagcaggagcucgacaaguacaagaacgccgucaccgaccuccagcuccucaugcaguccacccccgccgccggcuccggcuccgccaucgccuccggcaucgccgucugcaagguccuccaccucgagggcgaggucaacaagaucaagaacgcccuccucuccaccaacaaggccgucgucucccucuccggcugcggcgucuccguccucaccuucaagguccucgaccucaagaacuacaucgacaagcagcuccuccccauccucaacaagcaguccugcuccauccccaacaucgagaccgucaucgaguuccagcagaagaacaaccgccuccucgagaucacccgcgaguucuccgucaacgccggcgucaccacccccgucuccaccuacaugcucaccaacuccgagcuccucucccucaucaacgacaugcccaucaccaacgaccagaagaagcucauguccaacaacguccagaucguccgccagcaguccuacuccaucaugugcaucaucaaggaggagguccucgccuacgucguccagcucccccucuacggcgucaucgacacccccugcuggaagcuccacaccuccccccucugcaccaccaacaccaaggagggcuccaacaucugccucacccgcaccgaccgcggcugguacugcgacaacgccggcuccgucuccuucuucccccaggccgagaccugcaagguccaguccaaccgcgucuucugcgacaccaugaacucccucacccuccccuccgaggucaaccucugcaacaucgacaucuucaaccccaaguacgacugcaagaucaugaccuccaagaccgacgucuccuccuccgucaucaccucccucggcgccaucgucuccugcuacggcaagaccaagugcaccgccuccaacaagugccgcggcaucaucaagaccuucuccaacggcugcgacuacgucuccaacaagggcgucgacaccgucuccgucggcaacacccucuacuacgucaacaagcaggagggccagucccucuacgucaagggcgagcccaucaucaacuucuacgacccccucgucuuccccuccgacgaguucgacgccuccaucucccaggucaacgagaagaucaaccagucccucgccuucauccgcaaguccgacgagcuccuccacaacgucaacgucggcaaguccaccaccaacaucaugaucaccaccaucaucaucgucaucaucgucauccuccuccuccucaucgccgucggccucuuccucuacugcaaggcccgcugaggacuaguguccaccugucccuccugggcugcuggauugucucguuuuccugccaaauaaacaggaucagcgcuuuacagaucuaaaaaaaaaaaaaaaaaaaaaaaaaaaaaaaaaaaaaaaaaaaaaaaaaaaaaaaaaaaaaaaaugcaucccccccccccccccccccccccccccccccaaaggcucuuuucagagccaccagaauu

SEQ ID NO: 19679 - RNA, 1850 nt, Artificial Sequence
  mRNA product Design e-5 comprising derived and/or modified sequence from HRSV(Memphis-37)__AIY60640.1__F-del_DSCav1_mut8 (opt3)
gggagagcggcucggccauuuugucccagucaguccggaggcugcggcugcagaaguaccgccugcggaguaacugcaaagaagcuuaccauggagcugcccauccucaagaccaacgccauuacaacuauacuugcugcagugacgcugugcuucgccagcucccagaauaucaccgaagaguuuuaccaaucuacauguucagcggucaguaaaggcuauuugggggcuuuaagaacuggaugguacaccagcguuauuacaaucgaacuguccaacauuaaggagaucaaaugcaaugguaccgacgccaaggugaaacuaauaaagcaggaacucgauaaguauaaaaacgcaguaacugaccugcagcuucugaugcagucuacuccugccgcuggcucggggucagcaaucgccagcggaauugcuguguguaaggucuugcaccucgagggcgaggugaauaaaaucaagaacgcccugcugaguaccaauaaagcgguugugucccucucugguugcggggucagcguguuaacguucaagguacuggaucuuaagaacuacauugacaaacaauugcugccaauccuaaauaagcaguccuguucaauaccgaacauugaaacuguuaucgaguuucagcagaaaaauaacaggcuccuggaaauuacccgggaguucagugugaaugcaggagucacaacucccgugagcaccuauaugcuuacaaacucugagcuguugucccucaucaaugauaugccuaucaccaacgaccaaaagaaacugaugucaaacaaugugcagauuguccgccagcagagcuacaguauaaugugcaucauuaaggaagagguuuuagccuaugugguacaacugccacucuacggcgugaucgauacgcccuguuggaaacuucauacuucuccucugugcacaaccaacacuaaggaaggcuccaauauauguuugacacgaaccgaccgugggugguacugcgauaacgcuggaagcgucucguuuuucccacaggccgagacguguaaggugcagucuaauagaguuuucugcgacaccaugaacucccuaacacugcccucagaagugaaucucugcaacauugauaucuucaauccuaaauaugacuguaagaucaugacaaguaaaaccgaugucagcuccucugugauuacaagccugggugcaaucguaucaugcuacggcaagacuaaauguaccgcuaguaacaagugcagggggauuauaaagacauuuuccaauggaugugacuauguuagcaacaaaggcguggacaccgucucuguggguaauacucuuuacuaugucaacaagcaagaggggcagucacuguacgugaaaggagagccaaucauuaauuucuaugauccguugguuuuucccagugacgaauuugaugccagcaucucccaggugaacgagaagaucaaccagucucucgcguuuauucggaaaucggacgaacuguuacacaauguaaacgucggcaagagcacgacaaauauaaugaucaccacuauuaucauugugaucauaguuauccugcuacuccugauugccgugggccuuuucuuguacugcaaggcacgcugaggacuaguguccaccugucccuccugggcugcuggauugucucguuuuccugccaaauaaacaggaucagcgcuuuacagaucuaaaaaaaaaaaaaaaaaaaaaaaaaaaaaaaaaaaaaaaaaaaaaaaaaaaaaaaaaaaaaaaaugcaucccccccccccccccccccccccccccccccaaaggcucuuuucagagccaccagaauu

SEQ ID NO: 19680 - RNA, 1850 nt, Artificial Sequence
  mRNA product Design e-5 comprising derived and/or modified sequence from HRSV(Memphis-37)__AIY60640.1__F-del_DSCav1_mut8 (opt4)
gggagagcggcucggccauuuugucccagucaguccggaggcugcggcugcagaaguaccgccugcggaguaacugcaaagaagcuuaccauggagcugcccauccugaagaccaacgccaucaccaccauccuggccgccgugacccugugcuucgccagcagccagaacaucaccgaggaguucuaccagagcaccugcagcgccgugagcaagggcuaccugggcgcccugagaaccggcugguacaccagcgugaucaccaucgagcugagcaacaucaaggagaucaagugcaacggcaccgacgccaaggugaagcugaucaagcaggagcuggacaaguacaagaacgccgugaccgaccugcagcugcugaugcagagcacccccgccgccggcagcggcagcgccaucgccagcggcaucgccgugugcaaggugcugcaccuggagggcgaggugaacaagaucaagaacgcccugcugagcaccaacaaggccguggugagccugagcggcugcggcgugagcgugcugaccuucaaggugcuggaccugaagaacuacaucgacaagcagcugcugcccauccugaacaagcagagcugcagcauccccaacaucgagaccgugaucgaguuccagcagaagaacaacagacugcuggagaucaccagagaguucagcgugaacgccggcgugaccacccccgugagcaccuacaugcugaccaacagcgagcugcugagccugaucaacgacaugcccaucaccaacgaccagaagaagcugaugagcaacaacgugcagaucgugagacagcagagcuacagcaucaugugcaucaucaaggaggaggugcuggccuacguggugcagcugccccuguacggcgugaucgacacccccugcuggaagcugcacaccagcccccugugcaccaccaacaccaaggagggcagcaacaucugccugaccagaaccgacagaggcugguacugcgacaacgccggcagcgugagcuucuucccccaggccgagaccugcaaggugcagagcaacagaguguucugcgacaccaugaacagccugacccugcccagcgaggugaaccugugcaacaucgacaucuucaaccccaaguacgacugcaagaucaugaccagcaagaccgacgugagcagcagcgugaucaccagccugggcgccaucgugagcugcuacggcaagaccaagugcaccgccagcaacaagugcagaggcaucaucaagaccuucagcaacggcugcgacuacgugagcaacaagggcguggacaccgugagcgugggcaacacccuguacuacgugaacaagcaggagggccagagccuguacgugaagggcgagcccaucaucaacuucuacgacccccugguguuccccagcgacgaguucgacgccagcaucagccaggugaacgagaagaucaaccagagccuggccuucaucagaaagagcgacgagcugcugcacaacgugaacgugggcaagagcaccaccaacaucaugaucaccaccaucaucaucgugaucaucgugauccugcugcugcugaucgccgugggccuguuccuguacugcaaggccagaugaggacuaguguccaccugucccuccugggcugcuggauugucucguuuuccugccaaauaaacaggaucagcgcuuuacagaucuaaaaaaaaaaaaaaaaaaaaaaaaaaaaaaaaaaaaaaaaaaaaaaaaaaaaaaaaaaaaaaaaugcaucccccccccccccccccccccccccccccccaaaggcucuuuucagagccaccagaauu

SEQ ID NO: 19681 - RNA, 1850 nt, Artificial Sequence
  mRNA product Design e-5 comprising derived and/or modified sequence from HRSV(Memphis-37)__AIY60640.1__F-del_DSCav1_mut8 (opt5)
gggagagcggcucggccauuuugucccagucaguccggaggcugcggcugcagaaguaccgccugcggaguaacugcaaagaagcuuaccauggagcugcccauccucaagaccaacgccauuacaacgauccuggcugccgugacccuuugcuucgcgagcucccagaauauuacagaagaguuuuaccaaucuaccuguagcgcugucuccaaaggcuaucugggggcccucagaacaggaugguacaccucuguuaucacaauugaacugagcaacaucaaggagaucaaaugcaauggcaccgacgccaaggugaaacuuauuaagcaggaacuggauaaguauaaaaacgcugugacggaccuccagcugcugaugcaguccaccccugccgcugggucuggaagcgccaucgcguccggcauugccgucuguaaggugcuccaccuggagggggagguuaauaaaaucaagaacgcccuucugagcacaaauaaagcuguggucucucucuccggaugcggcgugagcguucugaccuucaaggugcuugaucugaagaacuacauugacaaacaacuccugccgauccugaauaagcagucuuguuccauucccaacaucgaaacagucaucgaguuucagcagaaaaauaaccggcuccuggaaauuacccgcgaguucagcgugaaugcuggcgugacgacaccugucucuaccuauaugcuuacaaacuccgagcugcucagccugaucaaugauaugcccauuaccaacgaccaaaagaaacuuauguccaacaauguucagaucgugagacagcagucuuacagcauuaugugcaucaucaaggaagaggugcuggccuaugucgugcaacucccucuguacgggguuauugauacccccuguuggaaacugcauacauccccucucugcacgaccaacacaaaggaaggaagcaauaucugucugacccggacagaccgcggcugguacugcgauaacgcggggucuguguccuuuuucccgcaggccgagaccuguaagguccagagcaauagaguguuuugcgacacgaugaacucucuuacacugcccagcgaaguuaaucucugcaacauugauaucuucaauccuaaauaugacuguaagauuaugaccuccaaaaccgaugugucuagcuccgucaucacaagccugggagcuaucgugucuugcuacggcaagaccaaauguacagccuccaacaagugccgggggauuaucaagacguuuagcaauggaugugacuaugucucuaacaaaggcguggacaccguuuccgugggcaauacacuuuacuaugucaacaagcaagaggggcagagccuguacgugaaaggagagcccauuaucaauuucuaugauccucucguuuuucccuccgacgaguucgaugcuucuauuagccaggugaacgaaaagaucaaccagucccuggccuuuauucgcaaaucugacgaacugcuccacaaugucaacgugggcaagagcaccacaaauaucaugaucaccacgauuaucauugugaucauuguuauccugcuucugcucaucgccgucgggcuguuccuguacugcaaggcuagaugaggacuaguguccaccugucccuccugggcugcuggauugucucguuuuccugccaaauaaacaggaucagcgcuuuacagaucuaaaaaaaaaaaaaaaaaaaaaaaaaaaaaaaaaaaaaaaaaaaaaaaaaaaaaaaaaaaaaaaaugcaucccccccccccccccccccccccccccccccaaaggcucuuuucagagccaccagaauu

SEQ ID NO: 19682 - RNA, 1850 nt, Artificial Sequence
  mRNA product Design e-5 comprising derived and/or modified sequence from HRSV(Memphis-37)__AIY60640.1__F-del_DSCav1_mut8 (opt6)
gggagagcggcucggccauuuugucccagucaguccggaggcugcggcugcagaaguaccgccugcggaguaacugcaaagaagcuuaccauggaacuacccauacuaaaaacaaacgcaauuacaacaauacuugccgcaguaaccuuaugcuuugccucaucccaaaacauaacagaagaauuuuaucaaucaacaugcuccgcaguaucaaaaggauaccuaggcgcucuaagaacaggaugguacacauccguaaucacaauagaacuauccaauauaaaagaaauaaaauguaauggaacagaugcaaaaguuaaauuaauaaaacaagaacuagacaaauacaaaaacgcaguuaccgaucuccaacuauuaaugcaaucaacaccagcugcaggaaguggaagcgccauagcaagcggaauagcagucugcaaaguauuacaucuugaaggcgaaguaaacaaaaucaaaaaugcccuccucucaacaaacaaagcuguaguaucccuaucaggaugcgguguaucuguucuuacauuuaaaguacucgaucuaaaaaacuacaucgauaaacaguuacuuccaauacucaacaaacaaucauguagcauaccaaacauagaaacaguaauagaauuucaacaaaaaaacaaucgacuacucgaaauaacuagagaauuuucuguaaacgcuggaguaaccacaccagugucuaccuauaugcuuacaaauagcgaacuccuaucacuaaucaaugacaugccaauaacaaaugaccagaaaaaacucaugucaaauaacguacaaauaguacgacaacaaagcuacuccauaaugugcauaaucaaagaagaaguauuagccuacguuguucaacuaccauuauauggaguuauagacacuccaugcuggaaauuacauacaagcccacucuguacaacaaacacaaaagaaggcucaaacauaugcuuaacaagaacagauagaggaugguacugcgauaacgcaggcucagucucauuuuuuccacaagccgaaaccugcaaaguacaaucaaauagaguuuuuugcgacacaaugaacucacucacucuaccaagugaaguaaaucucuguaauaucgacauauucaacccaaaauaugacugcaaaauaaugacaucuaaaaccgauguauccucaagcguaaucacaucauuaggagcuauaguuuccugcuacgguaaaacaaaaugcacagcauccaacaaaugucgcgguaucaucaaaacauucuccaacggaugugauuacguaucaaacaaaggugucgacaccguaagcguaggcaacacuuuauacuauguaaacaaacaagaaggacaaagucuauauguaaaaggagaaccaauaauaaacuucuaugacccccuaguauucccuuccgacgaauuugaugcaagcauuucacaaguuaacgaaaaaaucaaucaaucccuugcuuucauaagaaaaucagacgaauuacuacacaacguaaacguaggaaaaagcacaacaaauaucaugauuacaacaauaauaauuguaauaauaguaauacuccucuuacuuauagcagucggcuuauuccuuuacugcaaagcaagauaaggacuaguguccaccugucccuccugggcugcuggauugucucguuuuccugccaaauaaacaggaucagcgcuuuacagaucuaaaaaaaaaaaaaaaaaaaaaaaaaaaaaaaaaaaaaaaaaaaaaaaaaaaaaaaaaaaaaaaaugcaucccccccccccccccccccccccccccccccaaaggcucuuuucagagccaccagaauu

SEQ ID NO: 19683 - RNA, 1850 nt, Artificial Sequence
  mRNA product Design e-5 comprising derived and/or modified sequence from HRSV(Memphis-37)__AIY60640.1__F-del_DSCav1_mut8 (opt11)
gggagagcggcucggccauuuugucccagucaguccggaggcugcggcugcagaaguaccgccugcggaguaacugcaaagaagcuuaccauggaacuccccauccuaaaaaccaacgcaaucaccaccauccucgccgccguaacacucugcuuugcaagcucccaaaacaucaccgaagaauuuuaccaaucuaccugcagcgccguaucuaaaggauaccuaggagcccucagaaccgguugguacaccucugucaucacaauagaacucuccaacaucaaagaaaucaaaugcaacggcaccgacgccaaagucaaacucaucaaacaagaacucgacaaauauaaaaacgccguaaccgaccuccaacuccucaugcaauccacccccgccgccggcaguggcuccgcuaucgccuccggaaucgccguuugcaaaguccugcaccuagaaggcgaagucaacaaaaucaaaaacgcccugcucucaaccaacaaagcugucguaagccucuccggcugcggagucuccguccuuaccuucaaaguacucgaccuuaaaaacuacaucgacaaacaacuucuccccauacucaauaaacaauccugcuccauacccaacaucgaaacagucaucgaguuccaacagaaaaauaaccgccuccucgaaauaacccgcgaguucuccgucaacgcaggcgucaccaccccagucuccaccuacaugcugacaaacuccgaacuccuaucccucaucaacgacaugcccaucaccaacgaccaaaagaaacucaugagcaauaacguccaaaucguacgacaacaauccuacagcaucauguguaucaucaaagaagaaguacucgccuacgucguccaacucccacuauacggcgucaucgacacaccaugcuggaaacuucacaccuccccacucugcaccacaaacacaaaagaaggcuccaacaucugccuuacccgaaccgaccgcgggugguacugcgacaacgccggaucagucucguucuuuccccaagccgaaaccugcaaaguacaaucaaaucgcgucuucugcgacaccaugaacuccuuaacacuaccauccgaaguaaaccucugcaacauagacaucuucaacccaaaauacgacugcaaaaucaugaccuccaaaaccgacguauccuccuccguaaucaccagccucggcgcaauagucucaugcuacggcaaaaccaaaugcaccgccuccaacaaaugccgcggcaucauaaaaacuuucucuaacggaugcgacuacgucagcaacaaaggcgucgacaccguauccguagguaauacacuuuacuacgucaauaaacaagaaggccaaucccucuacgucaaaggagaacccaucauaaacuucuacgacccccucgucuuccccuccgacgaguucgacgccuccaucagccaggucaacgaaaagaucaaccaaucacucgccuucauccgcaaaagcgacgaacuccuccacaacguaaacgucggcaaauccacaaccaacauaaugaucaccacuaucaucaucgugauaaucgucauuuuacuucuccucaucgccguaggccucuuccuauacugcaaagcccgcuaaggacuaguguccaccugucccuccugggcugcuggauugucucguuuuccugccaaauaaacaggaucagcgcuuuacagaucuaaaaaaaaaaaaaaaaaaaaaaaaaaaaaaaaaaaaaaaaaaaaaaaaaaaaaaaaaaaaaaaaugcaucccccccccccccccccccccccccccccccaaaggcucuuuucagagccaccagaauu

SEQ ID NO: 19684 - RNA, 1917 nt, Artificial Sequence
  mRNA product Design e-6 comprising derived and/or modified sequence from HRSV(Memphis-37)__AIY60640.1__F-del_DSCav1_mut8 (opt1)
gggagagcggcucggccauuuugucccagucaguccggaggcugcggcugcagaaguaccgccugcggaguaacugcaaagaagcuuaccauggagcugcccauccucaagaccaacgccaucaccacgauccuggccgcggugacccugugcuucgccagcucccagaacaucaccgaggaguucuaccagagcacgugcuccgccgucagcaagggcuaccucggcgcccugcgcaccgggugguacaccagcgugaucaccaucgagcuguccaacaucaaggagaucaagugcaacggcaccgacgccaaggugaagcucaucaagcaggagcuggacaaguacaagaacgcggucacggaccugcagcuccugaugcagagcaccccggccgccggcuccgggagcgcgaucgccuccggcaucgccgucugcaaggugcugcaccucgagggcgaggugaacaagaucaagaacgcccugcuguccaccaacaaggccgucgugagccucuccggcugcggggugagcguccugaccuucaaggugcuggaccucaagaacuacaucgacaagcagcugcugcccauccugaacaagcagagcugcuccauccccaacaucgagaccgucaucgaguuccagcagaagaacaaccgccuccuggagaucacgcgggaguucagcgugaacgcgggcgugaccacccccgucuccaccuacaugcugacgaacagcgagcuccugucccugaucaacgacaugccgaucaccaacgaccagaagaagcucaugagcaacaacgugcagaucgugcgccagcaguccuacagcaucaugugcaucaucaaggaggagguccuggccuacguggugcagcugccccucuacggggucaucgacacccccugcuggaagcugcacaccagcccccugugcacgaccaacaccaaggagggcuccaacaucugccucacccggacggaccgcgggugguacugcgacaacgccggcagcguguccuucuucccgcaggccgagaccugcaagguccagagcaaccggguguucugcgacaccaugaacucccugacccugcccagcgaggugaaccucugcaacaucgacaucuucaaccccaaguacgacugcaagaucaugacguccaagaccgacgucagcuccagcgugaucaccucccugggcgccaucgugagcugcuacgggaagaccaagugcacggcgagcaacaagugccgcggcaucaucaagaccuucuccaacgggugcgacuacgucagcaacaagggcguggacaccguguccgucggcaacacccuguacuacgugaacaagcaggagggccagagccucuacgugaagggggagcccaucaucaacuucuacgacccgcuggucuuccccuccgacgaguucgacgccagcaucucccaggugaacgagaagaucaaccagagccuggccuucauccggaaguccgacgagcuccugcacaacgugaacgucggcaagagcaccacgaacaucaugaucaccaccaucaucaucgugaucaucgugauccugcugcuccugaucgccgucgggcuguuccucuacugcaaggcccgcugaggacuaguacuggcugcaucucccuuuccucuguccuccauccuucucccaggauggugaagggggaccugguacccagugauccccaccccaggauccuaaaucaugacuuaccugcuaauaaaaacucauuggaaaagugagaagaucuaaaaaaaaaaaaaaaaaaaaaaaaaaaaaaaaaaaaaaaaaaaaaaaaaaaaaaaaaaaaaaaaugcaucccccccccccccccccccccccccccccccaaaggcucuuuucagagccaccagaauu

SEQ ID NO: 19685 - RNA, 1917 nt, Artificial Sequence
  mRNA product Design e-6 comprising derived and/or modified sequence from HRSV(Memphis-37)__AIY60640.1__F-del_DSCav1_mut8 (opt1)
gggagagcggcucggccauuuugucccagucaguccggaggcugcggcugcagaaguaccgccugcggaguaacugcaaagaagcuuaccauggagcugcccauccucaagaccaacgccaucaccacgauccuggccgcggugacccugugcuucgccagcucccagaacaucaccgaggaguucuaccagagcacgugcuccgccgucagcaagggcuaccucggggcccugcgcaccggcugguacaccuccgugaucaccaucgagcugagcaacaucaaggagaucaagugcaacgggaccgacgccaaggugaagcucaucaagcaggagcuggacaaguacaagaacgcggucacggaccugcagcuccugaugcaguccaccccggccgccggcagcggguccgccaucgcgagcggcaucgccgugugcaaggugcugcaccucgagggcgaggucaacaagaucaagaacgcccugcuguccaccaacaaggccguggugagccucuccgggugcggcgucagcgugcugaccuucaaggugcuggaccucaagaacuacaucgacaagcagcugcugcccauccucaacaagcaguccugcagcauccccaacaucgagacggucaucgaguuccagcagaagaacaaccggcugcuggagaucacccgcgaguucuccgugaacgccggggugaccacccccgucagcacguacaugcucaccaacuccgagcugcugagccucaucaacgacaugccgaucaccaacgaccagaagaagcugaugagcaacaacgugcagaucgugcggcagcaguccuacagcaucaugugcaucaucaaggaggagguccuggcguacguggugcagcucccccuguacggcgucaucgacacccccugcuggaagcugcacacgagcccccucugcaccaccaacaccaaggagggguccaacaucugccugacgcgcaccgaccggggcugguacugcgacaacgccggcuccgugagcuucuucccgcaggccgagaccugcaaggugcaguccaaccgcgucuucugcgacaccaugaacagccugacgcuccccuccgaggugaaccugugcaacaucgacaucuucaaccccaaguacgacugcaagaucaugaccagcaagaccgacgucuccagcuccgugaucaccagccugggggccaucguguccugcuacggcaagacgaagugcaccgccagcaacaagugccgggggaucaucaagaccuucuccaacggcugcgacuacgucagcaacaagggcguggacaccguguccgucgggaacacgcucuacuacgugaacaagcaggagggccagagccuguacgugaagggggagcccaucaucaacuucuacgacccgcuggucuuccccagcgacgaguucgacgcguccaucagccaggugaacgagaagaucaaccagucccucgccuucauccgcaagagcgacgagcugcugcacaacgugaacgucggcaaguccaccaccaacaucaugaucaccaccaucaucaucgugaucaucgugauccuccugcugcucaucgccgucgggcuguuccuguacugcaaggcccggugaggacuaguacuggcugcaucucccuuuccucuguccuccauccuucucccaggauggugaagggggaccugguacccagugauccccaccccaggauccuaaaucaugacuuaccugcuaauaaaaacucauuggaaaagugagaagaucuaaaaaaaaaaaaaaaaaaaaaaaaaaaaaaaaaaaaaaaaaaaaaaaaaaaaaaaaaaaaaaaaugcaucccccccccccccccccccccccccccccccaaaggcucuuuucagagccaccagaauu

SEQ ID NO: 19686 - RNA, 1917 nt, Artificial Sequence
  mRNA product Design e-6 comprising derived and/or modified sequence from HRSV(Memphis-37)__AIY60640.1__F-del_DSCav1_mut8 (opt2)
gggagagcggcucggccauuuugucccagucaguccggaggcugcggcugcagaaguaccgccugcggaguaacugcaaagaagcuuaccauggagcuccccauccucaagaccaacgccaucaccaccauccucgccgccgucacccucugcuucgccuccucccagaacaucaccgaggaguucuaccaguccaccugcuccgccgucuccaagggcuaccucggcgcccuccgcaccggcugguacaccuccgucaucaccaucgagcucuccaacaucaaggagaucaagugcaacggcaccgacgccaaggucaagcucaucaagcaggagcucgacaaguacaagaacgccgucaccgaccuccagcuccucaugcaguccacccccgccgccggcuccggcuccgccaucgccuccggcaucgccgucugcaagguccuccaccucgagggcgaggucaacaagaucaagaacgcccuccucuccaccaacaaggccgucgucucccucuccggcugcggcgucuccguccucaccuucaagguccucgaccucaagaacuacaucgacaagcagcuccuccccauccucaacaagcaguccugcuccauccccaacaucgagaccgucaucgaguuccagcagaagaacaaccgccuccucgagaucacccgcgaguucuccgucaacgccggcgucaccacccccgucuccaccuacaugcucaccaacuccgagcuccucucccucaucaacgacaugcccaucaccaacgaccagaagaagcucauguccaacaacguccagaucguccgccagcaguccuacuccaucaugugcaucaucaaggaggagguccucgccuacgucguccagcucccccucuacggcgucaucgacacccccugcuggaagcuccacaccuccccccucugcaccaccaacaccaaggagggcuccaacaucugccucacccgcaccgaccgcggcugguacugcgacaacgccggcuccgucuccuucuucccccaggccgagaccugcaagguccaguccaaccgcgucuucugcgacaccaugaacucccucacccuccccuccgaggucaaccucugcaacaucgacaucuucaaccccaaguacgacugcaagaucaugaccuccaagaccgacgucuccuccuccgucaucaccucccucggcgccaucgucuccugcuacggcaagaccaagugcaccgccuccaacaagugccgcggcaucaucaagaccuucuccaacggcugcgacuacgucuccaacaagggcgucgacaccgucuccgucggcaacacccucuacuacgucaacaagcaggagggccagucccucuacgucaagggcgagcccaucaucaacuucuacgacccccucgucuuccccuccgacgaguucgacgccuccaucucccaggucaacgagaagaucaaccagucccucgccuucauccgcaaguccgacgagcuccuccacaacgucaacgucggcaaguccaccaccaacaucaugaucaccaccaucaucaucgucaucaucgucauccuccuccuccucaucgccgucggccucuuccucuacugcaaggcccgcugaggacuaguacuggcugcaucucccuuuccucuguccuccauccuucucccaggauggugaagggggaccugguacccagugauccccaccccaggauccuaaaucaugacuuaccugcuaauaaaaacucauuggaaaagugagaagaucuaaaaaaaaaaaaaaaaaaaaaaaaaaaaaaaaaaaaaaaaaaaaaaaaaaaaaaaaaaaaaaaaugcaucccccccccccccccccccccccccccccccaaaggcucuuuucagagccaccagaauu

SEQ ID NO: 19687 - RNA, 1917 nt, Artificial Sequence
  mRNA product Design e-6 comprising derived and/or modified sequence from HRSV(Memphis-37)__AIY60640.1__F-del_DSCav1_mut8 (opt3)
gggagagcggcucggccauuuugucccagucaguccggaggcugcggcugcagaaguaccgccugcggaguaacugcaaagaagcuuaccauggagcugcccauccucaagaccaacgccauuacaacuauacuugcugcagugacgcugugcuucgccagcucccagaauaucaccgaagaguuuuaccaaucuacauguucagcggucaguaaaggcuauuugggggcuuuaagaacuggaugguacaccagcguuauuacaaucgaacuguccaacauuaaggagaucaaaugcaaugguaccgacgccaaggugaaacuaauaaagcaggaacucgauaaguauaaaaacgcaguaacugaccugcagcuucugaugcagucuacuccugccgcuggcucggggucagcaaucgccagcggaauugcuguguguaaggucuugcaccucgagggcgaggugaauaaaaucaagaacgcccugcugaguaccaauaaagcgguugugucccucucugguugcggggucagcguguuaacguucaagguacuggaucuuaagaacuacauugacaaacaauugcugccaauccuaaauaagcaguccuguucaauaccgaacauugaaacuguuaucgaguuucagcagaaaaauaacaggcuccuggaaauuacccgggaguucagugugaaugcaggagucacaacucccgugagcaccuauaugcuuacaaacucugagcuguugucccucaucaaugauaugccuaucaccaacgaccaaaagaaacugaugucaaacaaugugcagauuguccgccagcagagcuacaguauaaugugcaucauuaaggaagagguuuuagccuaugugguacaacugccacucuacggcgugaucgauacgcccuguuggaaacuucauacuucuccucugugcacaaccaacacuaaggaaggcuccaauauauguuugacacgaaccgaccgugggugguacugcgauaacgcuggaagcgucucguuuuucccacaggccgagacguguaaggugcagucuaauagaguuuucugcgacaccaugaacucccuaacacugcccucagaagugaaucucugcaacauugauaucuucaauccuaaauaugacuguaagaucaugacaaguaaaaccgaugucagcuccucugugauuacaagccugggugcaaucguaucaugcuacggcaagacuaaauguaccgcuaguaacaagugcagggggauuauaaagacauuuuccaauggaugugacuauguuagcaacaaaggcguggacaccgucucuguggguaauacucuuuacuaugucaacaagcaagaggggcagucacuguacgugaaaggagagccaaucauuaauuucuaugauccguugguuuuucccagugacgaauuugaugccagcaucucccaggugaacgagaagaucaaccagucucucgcguuuauucggaaaucggacgaacuguuacacaauguaaacgucggcaagagcacgacaaauauaaugaucaccacuauuaucauugugaucauaguuauccugcuacuccugauugccgugggccuuuucuuguacugcaaggcacgcugaggacuaguacuggcugcaucucccuuuccucuguccuccauccuucucccaggauggugaagggggaccugguacccagugauccccaccccaggauccuaaaucaugacuuaccugcuaauaaaaacucauuggaaaagugagaagaucuaaaaaaaaaaaaaaaaaaaaaaaaaaaaaaaaaaaaaaaaaaaaaaaaaaaaaaaaaaaaaaaaugcaucccccccccccccccccccccccccccccccaaaggcucuuuucagagccaccagaauu

SEQ ID NO: 19688 - RNA, 1917 nt, Artificial Sequence
  mRNA product Design e-6 comprising derived and/or modified sequence from HRSV(Memphis-37)__AIY60640.1__F-del_DSCav1_mut8 (opt4)
gggagagcggcucggccauuuugucccagucaguccggaggcugcggcugcagaaguaccgccugcggaguaacugcaaagaagcuuaccauggagcugcccauccugaagaccaacgccaucaccaccauccuggccgccgugacccugugcuucgccagcagccagaacaucaccgaggaguucuaccagagcaccugcagcgccgugagcaagggcuaccugggcgcccugagaaccggcugguacaccagcgugaucaccaucgagcugagcaacaucaaggagaucaagugcaacggcaccgacgccaaggugaagcugaucaagcaggagcuggacaaguacaagaacgccgugaccgaccugcagcugcugaugcagagcacccccgccgccggcagcggcagcgccaucgccagcggcaucgccgugugcaaggugcugcaccuggagggcgaggugaacaagaucaagaacgcccugcugagcaccaacaaggccguggugagccugagcggcugcggcgugagcgugcugaccuucaaggugcuggaccugaagaacuacaucgacaagcagcugcugcccauccugaacaagcagagcugcagcauccccaacaucgagaccgugaucgaguuccagcagaagaacaacagacugcuggagaucaccagagaguucagcgugaacgccggcgugaccacccccgugagcaccuacaugcugaccaacagcgagcugcugagccugaucaacgacaugcccaucaccaacgaccagaagaagcugaugagcaacaacgugcagaucgugagacagcagagcuacagcaucaugugcaucaucaaggaggaggugcuggccuacguggugcagcugccccuguacggcgugaucgacacccccugcuggaagcugcacaccagcccccugugcaccaccaacaccaaggagggcagcaacaucugccugaccagaaccgacagaggcugguacugcgacaacgccggcagcgugagcuucuucccccaggccgagaccugcaaggugcagagcaacagaguguucugcgacaccaugaacagccugacccugcccagcgaggugaaccugugcaacaucgacaucuucaaccccaaguacgacugcaagaucaugaccagcaagaccgacgugagcagcagcgugaucaccagccugggcgccaucgugagcugcuacggcaagaccaagugcaccgccagcaacaagugcagaggcaucaucaagaccuucagcaacggcugcgacuacgugagcaacaagggcguggacaccgugagcgugggcaacacccuguacuacgugaacaagcaggagggccagagccuguacgugaagggcgagcccaucaucaacuucuacgacccccugguguuccccagcgacgaguucgacgccagcaucagccaggugaacgagaagaucaaccagagccuggccuucaucagaaagagcgacgagcugcugcacaacgugaacgugggcaagagcaccaccaacaucaugaucaccaccaucaucaucgugaucaucgugauccugcugcugcugaucgccgugggccuguuccuguacugcaaggccagaugaggacuaguacuggcugcaucucccuuuccucuguccuccauccuucucccaggauggugaagggggaccugguacccagugauccccaccccaggauccuaaaucaugacuuaccugcuaauaaaaacucauuggaaaagugagaagaucuaaaaaaaaaaaaaaaaaaaaaaaaaaaaaaaaaaaaaaaaaaaaaaaaaaaaaaaaaaaaaaaaugcaucccccccccccccccccccccccccccccccaaaggcucuuuucagagccaccagaauu

SEQ ID NO: 19689 - RNA, 1917 nt, Artificial Sequence
  mRNA product Design e-6 comprising derived and/or modified sequence from HRSV(Memphis-37)__AIY60640.1__F-del_DSCav1_mut8 (opt5)
gggagagcggcucggccauuuugucccagucaguccggaggcugcggcugcagaaguaccgccugcggaguaacugcaaagaagcuuaccauggagcugcccauccucaagaccaacgccauuacaacgauccuggcugccgugacccuuugcuucgcgagcucccagaauauuacagaagaguuuuaccaaucuaccuguagcgcugucuccaaaggcuaucugggggcccucagaacaggaugguacaccucuguuaucacaauugaacugagcaacaucaaggagaucaaaugcaauggcaccgacgccaaggugaaacuuauuaagcaggaacuggauaaguauaaaaacgcugugacggaccuccagcugcugaugcaguccaccccugccgcugggucuggaagcgccaucgcguccggcauugccgucuguaaggugcuccaccuggagggggagguuaauaaaaucaagaacgcccuucugagcacaaauaaagcuguggucucucucuccggaugcggcgugagcguucugaccuucaaggugcuugaucugaagaacuacauugacaaacaacuccugccgauccugaauaagcagucuuguuccauucccaacaucgaaacagucaucgaguuucagcagaaaaauaaccggcuccuggaaauuacccgcgaguucagcgugaaugcuggcgugacgacaccugucucuaccuauaugcuuacaaacuccgagcugcucagccugaucaaugauaugcccauuaccaacgaccaaaagaaacuuauguccaacaauguucagaucgugagacagcagucuuacagcauuaugugcaucaucaaggaagaggugcuggccuaugucgugcaacucccucuguacgggguuauugauacccccuguuggaaacugcauacauccccucucugcacgaccaacacaaaggaaggaagcaauaucugucugacccggacagaccgcggcugguacugcgauaacgcggggucuguguccuuuuucccgcaggccgagaccuguaagguccagagcaauagaguguuuugcgacacgaugaacucucuuacacugcccagcgaaguuaaucucugcaacauugauaucuucaauccuaaauaugacuguaagauuaugaccuccaaaaccgaugugucuagcuccgucaucacaagccugggagcuaucgugucuugcuacggcaagaccaaauguacagccuccaacaagugccgggggauuaucaagacguuuagcaauggaugugacuaugucucuaacaaaggcguggacaccguuuccgugggcaauacacuuuacuaugucaacaagcaagaggggcagagccuguacgugaaaggagagcccauuaucaauuucuaugauccucucguuuuucccuccgacgaguucgaugcuucuauuagccaggugaacgaaaagaucaaccagucccuggccuuuauucgcaaaucugacgaacugcuccacaaugucaacgugggcaagagcaccacaaauaucaugaucaccacgauuaucauugugaucauuguuauccugcuucugcucaucgccgucgggcuguuccuguacugcaaggcuagaugaggacuaguacuggcugcaucucccuuuccucuguccuccauccuucucccaggauggugaagggggaccugguacccagugauccccaccccaggauccuaaaucaugacuuaccugcuaauaaaaacucauuggaaaagugagaagaucuaaaaaaaaaaaaaaaaaaaaaaaaaaaaaaaaaaaaaaaaaaaaaaaaaaaaaaaaaaaaaaaaugcaucccccccccccccccccccccccccccccccaaaggcucuuuucagagccaccagaauu

SEQ ID NO: 19690 - RNA, 1917 nt, Artificial Sequence
  mRNA product Design e-6 comprising derived and/or modified sequence from HRSV(Memphis-37)__AIY60640.1__F-del_DSCav1_mut8 (opt6)
gggagagcggcucggccauuuugucccagucaguccggaggcugcggcugcagaaguaccgccugcggaguaacugcaaagaagcuuaccauggaacuacccauacuaaaaacaaacgcaauuacaacaauacuugccgcaguaaccuuaugcuuugccucaucccaaaacauaacagaagaauuuuaucaaucaacaugcuccgcaguaucaaaaggauaccuaggcgcucuaagaacaggaugguacacauccguaaucacaauagaacuauccaauauaaaagaaauaaaauguaauggaacagaugcaaaaguuaaauuaauaaaacaagaacuagacaaauacaaaaacgcaguuaccgaucuccaacuauuaaugcaaucaacaccagcugcaggaaguggaagcgccauagcaagcggaauagcagucugcaaaguauuacaucuugaaggcgaaguaaacaaaaucaaaaaugcccuccucucaacaaacaaagcuguaguaucccuaucaggaugcgguguaucuguucuuacauuuaaaguacucgaucuaaaaaacuacaucgauaaacaguuacuuccaauacucaacaaacaaucauguagcauaccaaacauagaaacaguaauagaauuucaacaaaaaaacaaucgacuacucgaaauaacuagagaauuuucuguaaacgcuggaguaaccacaccagugucuaccuauaugcuuacaaauagcgaacuccuaucacuaaucaaugacaugccaauaacaaaugaccagaaaaaacucaugucaaauaacguacaaauaguacgacaacaaagcuacuccauaaugugcauaaucaaagaagaaguauuagccuacguuguucaacuaccauuauauggaguuauagacacuccaugcuggaaauuacauacaagcccacucuguacaacaaacacaaaagaaggcucaaacauaugcuuaacaagaacagauagaggaugguacugcgauaacgcaggcucagucucauuuuuuccacaagccgaaaccugcaaaguacaaucaaauagaguuuuuugcgacacaaugaacucacucacucuaccaagugaaguaaaucucuguaauaucgacauauucaacccaaaauaugacugcaaaauaaugacaucuaaaaccgauguauccucaagcguaaucacaucauuaggagcuauaguuuccugcuacgguaaaacaaaaugcacagcauccaacaaaugucgcgguaucaucaaaacauucuccaacggaugugauuacguaucaaacaaaggugucgacaccguaagcguaggcaacacuuuauacuauguaaacaaacaagaaggacaaagucuauauguaaaaggagaaccaauaauaaacuucuaugacccccuaguauucccuuccgacgaauuugaugcaagcauuucacaaguuaacgaaaaaaucaaucaaucccuugcuuucauaagaaaaucagacgaauuacuacacaacguaaacguaggaaaaagcacaacaaauaucaugauuacaacaauaauaauuguaauaauaguaauacuccucuuacuuauagcagucggcuuauuccuuuacugcaaagcaagauaaggacuaguacuggcugcaucucccuuuccucuguccuccauccuucucccaggauggugaagggggaccugguacccagugauccccaccccaggauccuaaaucaugacuuaccugcuaauaaaaacucauuggaaaagugagaagaucuaaaaaaaaaaaaaaaaaaaaaaaaaaaaaaaaaaaaaaaaaaaaaaaaaaaaaaaaaaaaaaaaugcaucccccccccccccccccccccccccccccccaaaggcucuuuucagagccaccagaauu

SEQ ID NO: 19691 - RNA, 1917 nt, Artificial Sequence
  mRNA product Design e-6 comprising derived and/or modified sequence from HRSV(Memphis-37)__AIY60640.1__F-del_DSCav1_mut8 (opt11)
gggagagcggcucggccauuuugucccagucaguccggaggcugcggcugcagaaguaccgccugcggaguaacugcaaagaagcuuaccauggaacuccccauccuaaaaaccaacgcaaucaccaccauccucgccgccguaacacucugcuuugcaagcucccaaaacaucaccgaagaauuuuaccaaucuaccugcagcgccguaucuaaaggauaccuaggagcccucagaaccgguugguacaccucugucaucacaauagaacucuccaacaucaaagaaaucaaaugcaacggcaccgacgccaaagucaaacucaucaaacaagaacucgacaaauauaaaaacgccguaaccgaccuccaacuccucaugcaauccacccccgccgccggcaguggcuccgcuaucgccuccggaaucgccguuugcaaaguccugcaccuagaaggcgaagucaacaaaaucaaaaacgcccugcucucaaccaacaaagcugucguaagccucuccggcugcggagucuccguccuuaccuucaaaguacucgaccuuaaaaacuacaucgacaaacaacuucuccccauacucaauaaacaauccugcuccauacccaacaucgaaacagucaucgaguuccaacagaaaaauaaccgccuccucgaaauaacccgcgaguucuccgucaacgcaggcgucaccaccccagucuccaccuacaugcugacaaacuccgaacuccuaucccucaucaacgacaugcccaucaccaacgaccaaaagaaacucaugagcaauaacguccaaaucguacgacaacaauccuacagcaucauguguaucaucaaagaagaaguacucgccuacgucguccaacucccacuauacggcgucaucgacacaccaugcuggaaacuucacaccuccccacucugcaccacaaacacaaaagaaggcuccaacaucugccuuacccgaaccgaccgcgggugguacugcgacaacgccggaucagucucguucuuuccccaagccgaaaccugcaaaguacaaucaaaucgcgucuucugcgacaccaugaacuccuuaacacuaccauccgaaguaaaccucugcaacauagacaucuucaacccaaaauacgacugcaaaaucaugaccuccaaaaccgacguauccuccuccguaaucaccagccucggcgcaauagucucaugcuacggcaaaaccaaaugcaccgccuccaacaaaugccgcggcaucauaaaaacuuucucuaacggaugcgacuacgucagcaacaaaggcgucgacaccguauccguagguaauacacuuuacuacgucaauaaacaagaaggccaaucccucuacgucaaaggagaacccaucauaaacuucuacgacccccucgucuuccccuccgacgaguucgacgccuccaucagccaggucaacgaaaagaucaaccaaucacucgccuucauccgcaaaagcgacgaacuccuccacaacguaaacgucggcaaauccacaaccaacauaaugaucaccacuaucaucaucgugauaaucgucauuuuacuucuccucaucgccguaggccucuuccuauacugcaaagcccgcuaaggacuaguacuggcugcaucucccuuuccucuguccuccauccuucucccaggauggugaagggggaccugguacccagugauccccaccccaggauccuaaaucaugacuuaccugcuaauaaaaacucauuggaaaagugagaagaucuaaaaaaaaaaaaaaaaaaaaaaaaaaaaaaaaaaaaaaaaaaaaaaaaaaaaaaaaaaaaaaaaugcaucccccccccccccccccccccccccccccccaaaggcucuuuucagagccaccagaauu

SEQ ID NO: 19692 - RNA, 2133 nt, Artificial Sequence
  mRNA product Design f-1 comprising derived and/or modified sequence from HRSV(Memphis-37)__AIY60640.1__F-del_DSCav1_mut8 (opt1)
gggagagcggcucggccauuuugucccagucaguccggaggcugcggcugcagaaguaccgccugcggaguaacugcaaagaagcuuaccauggagcugcccauccucaagaccaacgccaucaccacgauccuggccgcggugacccugugcuucgccagcucccagaacaucaccgaggaguucuaccagagcacgugcuccgccgucagcaagggcuaccucggcgcccugcgcaccgggugguacaccagcgugaucaccaucgagcuguccaacaucaaggagaucaagugcaacggcaccgacgccaaggugaagcucaucaagcaggagcuggacaaguacaagaacgcggucacggaccugcagcuccugaugcagagcaccccggccgccggcuccgggagcgcgaucgccuccggcaucgccgucugcaaggugcugcaccucgagggcgaggugaacaagaucaagaacgcccugcuguccaccaacaaggccgucgugagccucuccggcugcggggugagcguccugaccuucaaggugcuggaccucaagaacuacaucgacaagcagcugcugcccauccugaacaagcagagcugcuccauccccaacaucgagaccgucaucgaguuccagcagaagaacaaccgccuccuggagaucacgcgggaguucagcgugaacgcgggcgugaccacccccgucuccaccuacaugcugacgaacagcgagcuccugucccugaucaacgacaugccgaucaccaacgaccagaagaagcucaugagcaacaacgugcagaucgugcgccagcaguccuacagcaucaugugcaucaucaaggaggagguccuggccuacguggugcagcugccccucuacggggucaucgacacccccugcuggaagcugcacaccagcccccugugcacgaccaacaccaaggagggcuccaacaucugccucacccggacggaccgcgggugguacugcgacaacgccggcagcguguccuucuucccgcaggccgagaccugcaagguccagagcaaccggguguucugcgacaccaugaacucccugacccugcccagcgaggugaaccucugcaacaucgacaucuucaaccccaaguacgacugcaagaucaugacguccaagaccgacgucagcuccagcgugaucaccucccugggcgccaucgugagcugcuacgggaagaccaagugcacggcgagcaacaagugccgcggcaucaucaagaccuucuccaacgggugcgacuacgucagcaacaagggcguggacaccguguccgucggcaacacccuguacuacgugaacaagcaggagggccagagccucuacgugaagggggagcccaucaucaacuucuacgacccgcuggucuuccccuccgacgaguucgacgccagcaucucccaggugaacgagaagaucaaccagagccuggccuucauccggaaguccgacgagcuccugcacaacgugaacgucggcaagagcaccacgaacaucaugaucaccaccaucaucaucgugaucaucgugauccugcugcuccugaucgccgucgggcuguuccucuacugcaaggcccgcugaggacuagugaagggaacacccaaauuuaauucagccuuaagcacaauuaauuaagagugaaacguaauuguacaagcaguuggucacccaccauagggcaugaucaacaccgcaaccuuuccuuuuucccccagugauucugaaaaaccccucuucccuucagcuugcuuagauguuccaaauuuaguaagcuuaaggcggccuacagaagaaaaagaaaaaaaaggccacaaaaguucccucucacuuucaguaaauaaaauaaaagcagcaacagaaauaaagaaauaaaugaaauucaaaaugaaauaaauauuguguugugcagcauuaaaaaaucaauaaaaauuaaaaaugagcaagaucuaaaaaaaaaaaaaaaaaaaaaaaaaaaaaaaaaaaaaaaaaaaaaaaaaaaaaaaaaaaaaaaaugcaucccccccccccccccccccccccccccccccaaaggcucuuuucagagccaccagaauu

SEQ ID NO: 19693 - RNA, 2133 nt, Artificial Sequence
  mRNA product Design f-1 comprising derived and/or modified sequence from HRSV(Memphis-37)__AIY60640.1__F-del_DSCav1_mut8 (opt1)
gggagagcggcucggccauuuugucccagucaguccggaggcugcggcugcagaaguaccgccugcggaguaacugcaaagaagcuuaccauggagcugcccauccucaagaccaacgccaucaccacgauccuggccgcggugacccugugcuucgccagcucccagaacaucaccgaggaguucuaccagagcacgugcuccgccgucagcaagggcuaccucggggcccugcgcaccggcugguacaccuccgugaucaccaucgagcugagcaacaucaaggagaucaagugcaacgggaccgacgccaaggugaagcucaucaagcaggagcuggacaaguacaagaacgcggucacggaccugcagcuccugaugcaguccaccccggccgccggcagcggguccgccaucgcgagcggcaucgccgugugcaaggugcugcaccucgagggcgaggucaacaagaucaagaacgcccugcuguccaccaacaaggccguggugagccucuccgggugcggcgucagcgugcugaccuucaaggugcuggaccucaagaacuacaucgacaagcagcugcugcccauccucaacaagcaguccugcagcauccccaacaucgagacggucaucgaguuccagcagaagaacaaccggcugcuggagaucacccgcgaguucuccgugaacgccggggugaccacccccgucagcacguacaugcucaccaacuccgagcugcugagccucaucaacgacaugccgaucaccaacgaccagaagaagcugaugagcaacaacgugcagaucgugcggcagcaguccuacagcaucaugugcaucaucaaggaggagguccuggcguacguggugcagcucccccuguacggcgucaucgacacccccugcuggaagcugcacacgagcccccucugcaccaccaacaccaaggagggguccaacaucugccugacgcgcaccgaccggggcugguacugcgacaacgccggcuccgugagcuucuucccgcaggccgagaccugcaaggugcaguccaaccgcgucuucugcgacaccaugaacagccugacgcuccccuccgaggugaaccugugcaacaucgacaucuucaaccccaaguacgacugcaagaucaugaccagcaagaccgacgucuccagcuccgugaucaccagccugggggccaucguguccugcuacggcaagacgaagugcaccgccagcaacaagugccgggggaucaucaagaccuucuccaacggcugcgacuacgucagcaacaagggcguggacaccguguccgucgggaacacgcucuacuacgugaacaagcaggagggccagagccuguacgugaagggggagcccaucaucaacuucuacgacccgcuggucuuccccagcgacgaguucgacgcguccaucagccaggugaacgagaagaucaaccagucccucgccuucauccgcaagagcgacgagcugcugcacaacgugaacgucggcaaguccaccaccaacaucaugaucaccaccaucaucaucgugaucaucgugauccuccugcugcucaucgccgucgggcuguuccuguacugcaaggcccggugaggacuagugaagggaacacccaaauuuaauucagccuuaagcacaauuaauuaagagugaaacguaauuguacaagcaguuggucacccaccauagggcaugaucaacaccgcaaccuuuccuuuuucccccagugauucugaaaaaccccucuucccuucagcuugcuuagauguuccaaauuuaguaagcuuaaggcggccuacagaagaaaaagaaaaaaaaggccacaaaaguucccucucacuuucaguaaauaaaauaaaagcagcaacagaaauaaagaaauaaaugaaauucaaaaugaaauaaauauuguguugugcagcauuaaaaaaucaauaaaaauuaaaaaugagcaagaucuaaaaaaaaaaaaaaaaaaaaaaaaaaaaaaaaaaaaaaaaaaaaaaaaaaaaaaaaaaaaaaaaugcaucccccccccccccccccccccccccccccccaaaggcucuuuucagagccaccagaauu

SEQ ID NO: 19694 - RNA, 2133 nt, Artificial Sequence
  mRNA product Design f-1 comprising derived and/or modified sequence from HRSV(Memphis-37)__AIY60640.1__F-del_DSCav1_mut8 (opt2)
gggagagcggcucggccauuuugucccagucaguccggaggcugcggcugcagaaguaccgccugcggaguaacugcaaagaagcuuaccauggagcuccccauccucaagaccaacgccaucaccaccauccucgccgccgucacccucugcuucgccuccucccagaacaucaccgaggaguucuaccaguccaccugcuccgccgucuccaagggcuaccucggcgcccuccgcaccggcugguacaccuccgucaucaccaucgagcucuccaacaucaaggagaucaagugcaacggcaccgacgccaaggucaagcucaucaagcaggagcucgacaaguacaagaacgccgucaccgaccuccagcuccucaugcaguccacccccgccgccggcuccggcuccgccaucgccuccggcaucgccgucugcaagguccuccaccucgagggcgaggucaacaagaucaagaacgcccuccucuccaccaacaaggccgucgucucccucuccggcugcggcgucuccguccucaccuucaagguccucgaccucaagaacuacaucgacaagcagcuccuccccauccucaacaagcaguccugcuccauccccaacaucgagaccgucaucgaguuccagcagaagaacaaccgccuccucgagaucacccgcgaguucuccgucaacgccggcgucaccacccccgucuccaccuacaugcucaccaacuccgagcuccucucccucaucaacgacaugcccaucaccaacgaccagaagaagcucauguccaacaacguccagaucguccgccagcaguccuacuccaucaugugcaucaucaaggaggagguccucgccuacgucguccagcucccccucuacggcgucaucgacacccccugcuggaagcuccacaccuccccccucugcaccaccaacaccaaggagggcuccaacaucugccucacccgcaccgaccgcggcugguacugcgacaacgccggcuccgucuccuucuucccccaggccgagaccugcaagguccaguccaaccgcgucuucugcgacaccaugaacucccucacccuccccuccgaggucaaccucugcaacaucgacaucuucaaccccaaguacgacugcaagaucaugaccuccaagaccgacgucuccuccuccgucaucaccucccucggcgccaucgucuccugcuacggcaagaccaagugcaccgccuccaacaagugccgcggcaucaucaagaccuucuccaacggcugcgacuacgucuccaacaagggcgucgacaccgucuccgucggcaacacccucuacuacgucaacaagcaggagggccagucccucuacgucaagggcgagcccaucaucaacuucuacgacccccucgucuuccccuccgacgaguucgacgccuccaucucccaggucaacgagaagaucaaccagucccucgccuucauccgcaaguccgacgagcuccuccacaacgucaacgucggcaaguccaccaccaacaucaugaucaccaccaucaucaucgucaucaucgucauccuccuccuccucaucgccgucggccucuuccucuacugcaaggcccgcugaggacuagugaagggaacacccaaauuuaauucagccuuaagcacaauuaauuaagagugaaacguaauuguacaagcaguuggucacccaccauagggcaugaucaacaccgcaaccuuuccuuuuucccccagugauucugaaaaaccccucuucccuucagcuugcuuagauguuccaaauuuaguaagcuuaaggcggccuacagaagaaaaagaaaaaaaaggccacaaaaguucccucucacuuucaguaaauaaaauaaaagcagcaacagaaauaaagaaauaaaugaaauucaaaaugaaauaaauauuguguugugcagcauuaaaaaaucaauaaaaauuaaaaaugagcaagaucuaaaaaaaaaaaaaaaaaaaaaaaaaaaaaaaaaaaaaaaaaaaaaaaaaaaaaaaaaaaaaaaaugcaucccccccccccccccccccccccccccccccaaaggcucuuuucagagccaccagaauu

SEQ ID NO: 19695 - RNA, 2133 nt, Artificial Sequence
  mRNA product Design f-1 comprising derived and/or modified sequence from HRSV(Memphis-37)__AIY60640.1__F-del_DSCav1_mut8 (opt3)
gggagagcggcucggccauuuugucccagucaguccggaggcugcggcugcagaaguaccgccugcggaguaacugcaaagaagcuuaccauggagcugcccauccucaagaccaacgccauuacaacuauacuugcugcagugacgcugugcuucgccagcucccagaauaucaccgaagaguuuuaccaaucuacauguucagcggucaguaaaggcuauuugggggcuuuaagaacuggaugguacaccagcguuauuacaaucgaacuguccaacauuaaggagaucaaaugcaaugguaccgacgccaaggugaaacuaauaaagcaggaacucgauaaguauaaaaacgcaguaacugaccugcagcuucugaugcagucuacuccugccgcuggcucggggucagcaaucgccagcggaauugcuguguguaaggucuugcaccucgagggcgaggugaauaaaaucaagaacgcccugcugaguaccaauaaagcgguugugucccucucugguugcggggucagcguguuaacguucaagguacuggaucuuaagaacuacauugacaaacaauugcugccaauccuaaauaagcaguccuguucaauaccgaacauugaaacuguuaucgaguuucagcagaaaaauaacaggcuccuggaaauuacccgggaguucagugugaaugcaggagucacaacucccgugagcaccuauaugcuuacaaacucugagcuguugucccucaucaaugauaugccuaucaccaacgaccaaaagaaacugaugucaaacaaugugcagauuguccgccagcagagcuacaguauaaugugcaucauuaaggaagagguuuuagccuaugugguacaacugccacucuacggcgugaucgauacgcccuguuggaaacuucauacuucuccucugugcacaaccaacacuaaggaaggcuccaauauauguuugacacgaaccgaccgugggugguacugcgauaacgcuggaagcgucucguuuuucccacaggccgagacguguaaggugcagucuaauagaguuuucugcgacaccaugaacucccuaacacugcccucagaagugaaucucugcaacauugauaucuucaauccuaaauaugacuguaagaucaugacaaguaaaaccgaugucagcuccucugugauuacaagccugggugcaaucguaucaugcuacggcaagacuaaauguaccgcuaguaacaagugcagggggauuauaaagacauuuuccaauggaugugacuauguuagcaacaaaggcguggacaccgucucuguggguaauacucuuuacuaugucaacaagcaagaggggcagucacuguacgugaaaggagagccaaucauuaauuucuaugauccguugguuuuucccagugacgaauuugaugccagcaucucccaggugaacgagaagaucaaccagucucucgcguuuauucggaaaucggacgaacuguuacacaauguaaacgucggcaagagcacgacaaauauaaugaucaccacuauuaucauugugaucauaguuauccugcuacuccugauugccgugggccuuuucuuguacugcaaggcacgcugaggacuagugaagggaacacccaaauuuaauucagccuuaagcacaauuaauuaagagugaaacguaauuguacaagcaguuggucacccaccauagggcaugaucaacaccgcaaccuuuccuuuuucccccagugauucugaaaaaccccucuucccuucagcuugcuuagauguuccaaauuuaguaagcuuaaggcggccuacagaagaaaaagaaaaaaaaggccacaaaaguucccucucacuuucaguaaauaaaauaaaagcagcaacagaaauaaagaaauaaaugaaauucaaaaugaaauaaauauuguguugugcagcauuaaaaaaucaauaaaaauuaaaaaugagcaagaucuaaaaaaaaaaaaaaaaaaaaaaaaaaaaaaaaaaaaaaaaaaaaaaaaaaaaaaaaaaaaaaaaugcaucccccccccccccccccccccccccccccccaaaggcucuuuucagagccaccagaauu

SEQ ID NO: 19696 - RNA, 2133 nt, Artificial Sequence
  mRNA product Design f-1 comprising derived and/or modified sequence from HRSV(Memphis-37)__AIY60640.1__F-del_DSCav1_mut8 (opt4)
gggagagcggcucggccauuuugucccagucaguccggaggcugcggcugcagaaguaccgccugcggaguaacugcaaagaagcuuaccauggagcugcccauccugaagaccaacgccaucaccaccauccuggccgccgugacccugugcuucgccagcagccagaacaucaccgaggaguucuaccagagcaccugcagcgccgugagcaagggcuaccugggcgcccugagaaccggcugguacaccagcgugaucaccaucgagcugagcaacaucaaggagaucaagugcaacggcaccgacgccaaggugaagcugaucaagcaggagcuggacaaguacaagaacgccgugaccgaccugcagcugcugaugcagagcacccccgccgccggcagcggcagcgccaucgccagcggcaucgccgugugcaaggugcugcaccuggagggcgaggugaacaagaucaagaacgcccugcugagcaccaacaaggccguggugagccugagcggcugcggcgugagcgugcugaccuucaaggugcuggaccugaagaacuacaucgacaagcagcugcugcccauccugaacaagcagagcugcagcauccccaacaucgagaccgugaucgaguuccagcagaagaacaacagacugcuggagaucaccagagaguucagcgugaacgccggcgugaccacccccgugagcaccuacaugcugaccaacagcgagcugcugagccugaucaacgacaugcccaucaccaacgaccagaagaagcugaugagcaacaacgugcagaucgugagacagcagagcuacagcaucaugugcaucaucaaggaggaggugcuggccuacguggugcagcugccccuguacggcgugaucgacacccccugcuggaagcugcacaccagcccccugugcaccaccaacaccaaggagggcagcaacaucugccugaccagaaccgacagaggcugguacugcgacaacgccggcagcgugagcuucuucccccaggccgagaccugcaaggugcagagcaacagaguguucugcgacaccaugaacagccugacccugcccagcgaggugaaccugugcaacaucgacaucuucaaccccaaguacgacugcaagaucaugaccagcaagaccgacgugagcagcagcgugaucaccagccugggcgccaucgugagcugcuacggcaagaccaagugcaccgccagcaacaagugcagaggcaucaucaagaccuucagcaacggcugcgacuacgugagcaacaagggcguggacaccgugagcgugggcaacacccuguacuacgugaacaagcaggagggccagagccuguacgugaagggcgagcccaucaucaacuucuacgacccccugguguuccccagcgacgaguucgacgccagcaucagccaggugaacgagaagaucaaccagagccuggccuucaucagaaagagcgacgagcugcugcacaacgugaacgugggcaagagcaccaccaacaucaugaucaccaccaucaucaucgugaucaucgugauccugcugcugcugaucgccgugggccuguuccuguacugcaaggccagaugaggacuagugaagggaacacccaaauuuaauucagccuuaagcacaauuaauuaagagugaaacguaauuguacaagcaguuggucacccaccauagggcaugaucaacaccgcaaccuuuccuuuuucccccagugauucugaaaaaccccucuucccuucagcuugcuuagauguuccaaauuuaguaagcuuaaggcggccuacagaagaaaaagaaaaaaaaggccacaaaaguucccucucacuuucaguaaauaaaauaaaagcagcaacagaaauaaagaaauaaaugaaauucaaaaugaaauaaauauuguguugugcagcauuaaaaaaucaauaaaaauuaaaaaugagcaagaucuaaaaaaaaaaaaaaaaaaaaaaaaaaaaaaaaaaaaaaaaaaaaaaaaaaaaaaaaaaaaaaaaugcaucccccccccccccccccccccccccccccccaaaggcucuuuucagagccaccagaauu

SEQ ID NO: 19697 - RNA, 2133 nt, Artificial Sequence
  mRNA product Design f-1 comprising derived and/or modified sequence from HRSV(Memphis-37)__AIY60640.1__F-del_DSCav1_mut8 (opt5)
gggagagcggcucggccauuuugucccagucaguccggaggcugcggcugcagaaguaccgccugcggaguaacugcaaagaagcuuaccauggagcugcccauccucaagaccaacgccauuacaacgauccuggcugccgugacccuuugcuucgcgagcucccagaauauuacagaagaguuuuaccaaucuaccuguagcgcugucuccaaaggcuaucugggggcccucagaacaggaugguacaccucuguuaucacaauugaacugagcaacaucaaggagaucaaaugcaauggcaccgacgccaaggugaaacuuauuaagcaggaacuggauaaguauaaaaacgcugugacggaccuccagcugcugaugcaguccaccccugccgcugggucuggaagcgccaucgcguccggcauugccgucuguaaggugcuccaccuggagggggagguuaauaaaaucaagaacgcccuucugagcacaaauaaagcuguggucucucucuccggaugcggcgugagcguucugaccuucaaggugcuugaucugaagaacuacauugacaaacaacuccugccgauccugaauaagcagucuuguuccauucccaacaucgaaacagucaucgaguuucagcagaaaaauaaccggcuccuggaaauuacccgcgaguucagcgugaaugcuggcgugacgacaccugucucuaccuauaugcuuacaaacuccgagcugcucagccugaucaaugauaugcccauuaccaacgaccaaaagaaacuuauguccaacaauguucagaucgugagacagcagucuuacagcauuaugugcaucaucaaggaagaggugcuggccuaugucgugcaacucccucuguacgggguuauugauacccccuguuggaaacugcauacauccccucucugcacgaccaacacaaaggaaggaagcaauaucugucugacccggacagaccgcggcugguacugcgauaacgcggggucuguguccuuuuucccgcaggccgagaccuguaagguccagagcaauagaguguuuugcgacacgaugaacucucuuacacugcccagcgaaguuaaucucugcaacauugauaucuucaauccuaaauaugacuguaagauuaugaccuccaaaaccgaugugucuagcuccgucaucacaagccugggagcuaucgugucuugcuacggcaagaccaaauguacagccuccaacaagugccgggggauuaucaagacguuuagcaauggaugugacuaugucucuaacaaaggcguggacaccguuuccgugggcaauacacuuuacuaugucaacaagcaagaggggcagagccuguacgugaaaggagagcccauuaucaauuucuaugauccucucguuuuucccuccgacgaguucgaugcuucuauuagccaggugaacgaaaagaucaaccagucccuggccuuuauucgcaaaucugacgaacugcuccacaaugucaacgugggcaagagcaccacaaauaucaugaucaccacgauuaucauugugaucauuguuauccugcuucugcucaucgccgucgggcuguuccuguacugcaaggcuagaugaggacuagugaagggaacacccaaauuuaauucagccuuaagcacaauuaauuaagagugaaacguaauuguacaagcaguuggucacccaccauagggcaugaucaacaccgcaaccuuuccuuuuucccccagugauucugaaaaaccccucuucccuucagcuugcuuagauguuccaaauuuaguaagcuuaaggcggccuacagaagaaaaagaaaaaaaaggccacaaaaguucccucucacuuucaguaaauaaaauaaaagcagcaacagaaauaaagaaauaaaugaaauucaaaaugaaauaaauauuguguugugcagcauuaaaaaaucaauaaaaauuaaaaaugagcaagaucuaaaaaaaaaaaaaaaaaaaaaaaaaaaaaaaaaaaaaaaaaaaaaaaaaaaaaaaaaaaaaaaaugcaucccccccccccccccccccccccccccccccaaaggcucuuuucagagccaccagaauu

SEQ ID NO: 19698 - RNA, 2133 nt, Artificial Sequence
  mRNA product Design f-1 comprising derived and/or modified sequence from HRSV(Memphis-37)__AIY60640.1__F-del_DSCav1_mut8 (opt6)
gggagagcggcucggccauuuugucccagucaguccggaggcugcggcugcagaaguaccgccugcggaguaacugcaaagaagcuuaccauggaacuacccauacuaaaaacaaacgcaauuacaacaauacuugccgcaguaaccuuaugcuuugccucaucccaaaacauaacagaagaauuuuaucaaucaacaugcuccgcaguaucaaaaggauaccuaggcgcucuaagaacaggaugguacacauccguaaucacaauagaacuauccaauauaaaagaaauaaaauguaauggaacagaugcaaaaguuaaauuaauaaaacaagaacuagacaaauacaaaaacgcaguuaccgaucuccaacuauuaaugcaaucaacaccagcugcaggaaguggaagcgccauagcaagcggaauagcagucugcaaaguauuacaucuugaaggcgaaguaaacaaaaucaaaaaugcccuccucucaacaaacaaagcuguaguaucccuaucaggaugcgguguaucuguucuuacauuuaaaguacucgaucuaaaaaacuacaucgauaaacaguuacuuccaauacucaacaaacaaucauguagcauaccaaacauagaaacaguaauagaauuucaacaaaaaaacaaucgacuacucgaaauaacuagagaauuuucuguaaacgcuggaguaaccacaccagugucuaccuauaugcuuacaaauagcgaacuccuaucacuaaucaaugacaugccaauaacaaaugaccagaaaaaacucaugucaaauaacguacaaauaguacgacaacaaagcuacuccauaaugugcauaaucaaagaagaaguauuagccuacguuguucaacuaccauuauauggaguuauagacacuccaugcuggaaauuacauacaagcccacucuguacaacaaacacaaaagaaggcucaaacauaugcuuaacaagaacagauagaggaugguacugcgauaacgcaggcucagucucauuuuuuccacaagccgaaaccugcaaaguacaaucaaauagaguuuuuugcgacacaaugaacucacucacucuaccaagugaaguaaaucucuguaauaucgacauauucaacccaaaauaugacugcaaaauaaugacaucuaaaaccgauguauccucaagcguaaucacaucauuaggagcuauaguuuccugcuacgguaaaacaaaaugcacagcauccaacaaaugucgcgguaucaucaaaacauucuccaacggaugugauuacguaucaaacaaaggugucgacaccguaagcguaggcaacacuuuauacuauguaaacaaacaagaaggacaaagucuauauguaaaaggagaaccaauaauaaacuucuaugacccccuaguauucccuuccgacgaauuugaugcaagcauuucacaaguuaacgaaaaaaucaaucaaucccuugcuuucauaagaaaaucagacgaauuacuacacaacguaaacguaggaaaaagcacaacaaauaucaugauuacaacaauaauaauuguaauaauaguaauacuccucuuacuuauagcagucggcuuauuccuuuacugcaaagcaagauaaggacuagugaagggaacacccaaauuuaauucagccuuaagcacaauuaauuaagagugaaacguaauuguacaagcaguuggucacccaccauagggcaugaucaacaccgcaaccuuuccuuuuucccccagugauucugaaaaaccccucuucccuucagcuugcuuagauguuccaaauuuaguaagcuuaaggcggccuacagaagaaaaagaaaaaaaaggccacaaaaguucccucucacuuucaguaaauaaaauaaaagcagcaacagaaauaaagaaauaaaugaaauucaaaaugaaauaaauauuguguugugcagcauuaaaaaaucaauaaaaauuaaaaaugagcaagaucuaaaaaaaaaaaaaaaaaaaaaaaaaaaaaaaaaaaaaaaaaaaaaaaaaaaaaaaaaaaaaaaaugcaucccccccccccccccccccccccccccccccaaaggcucuuuucagagccaccagaauu

SEQ ID NO: 19699 - RNA, 2133 nt, Artificial Sequence
  mRNA product Design f-1 comprising derived and/or modified sequence from HRSV(Memphis-37)__AIY60640.1__F-del_DSCav1_mut8 (opt11)
gggagagcggcucggccauuuugucccagucaguccggaggcugcggcugcagaaguaccgccugcggaguaacugcaaagaagcuuaccauggaacuccccauccuaaaaaccaacgcaaucaccaccauccucgccgccguaacacucugcuuugcaagcucccaaaacaucaccgaagaauuuuaccaaucuaccugcagcgccguaucuaaaggauaccuaggagcccucagaaccgguugguacaccucugucaucacaauagaacucuccaacaucaaagaaaucaaaugcaacggcaccgacgccaaagucaaacucaucaaacaagaacucgacaaauauaaaaacgccguaaccgaccuccaacuccucaugcaauccacccccgccgccggcaguggcuccgcuaucgccuccggaaucgccguuugcaaaguccugcaccuagaaggcgaagucaacaaaaucaaaaacgcccugcucucaaccaacaaagcugucguaagccucuccggcugcggagucuccguccuuaccuucaaaguacucgaccuuaaaaacuacaucgacaaacaacuucuccccauacucaauaaacaauccugcuccauacccaacaucgaaacagucaucgaguuccaacagaaaaauaaccgccuccucgaaauaacccgcgaguucuccgucaacgcaggcgucaccaccccagucuccaccuacaugcugacaaacuccgaacuccuaucccucaucaacgacaugcccaucaccaacgaccaaaagaaacucaugagcaauaacguccaaaucguacgacaacaauccuacagcaucauguguaucaucaaagaagaaguacucgccuacgucguccaacucccacuauacggcgucaucgacacaccaugcuggaaacuucacaccuccccacucugcaccacaaacacaaaagaaggcuccaacaucugccuuacccgaaccgaccgcgggugguacugcgacaacgccggaucagucucguucuuuccccaagccgaaaccugcaaaguacaaucaaaucgcgucuucugcgacaccaugaacuccuuaacacuaccauccgaaguaaaccucugcaacauagacaucuucaacccaaaauacgacugcaaaaucaugaccuccaaaaccgacguauccuccuccguaaucaccagccucggcgcaauagucucaugcuacggcaaaaccaaaugcaccgccuccaacaaaugccgcggcaucauaaaaacuuucucuaacggaugcgacuacgucagcaacaaaggcgucgacaccguauccguagguaauacacuuuacuacgucaauaaacaagaaggccaaucccucuacgucaaaggagaacccaucauaaacuucuacgacccccucgucuuccccuccgacgaguucgacgccuccaucagccaggucaacgaaaagaucaaccaaucacucgccuucauccgcaaaagcgacgaacuccuccacaacguaaacgucggcaaauccacaaccaacauaaugaucaccacuaucaucaucgugauaaucgucauuuuacuucuccucaucgccguaggccucuuccuauacugcaaagcccgcuaaggacuagugaagggaacacccaaauuuaauucagccuuaagcacaauuaauuaagagugaaacguaauuguacaagcaguuggucacccaccauagggcaugaucaacaccgcaaccuuuccuuuuucccccagugauucugaaaaaccccucuucccuucagcuugcuuagauguuccaaauuuaguaagcuuaaggcggccuacagaagaaaaagaaaaaaaaggccacaaaaguucccucucacuuucaguaaauaaaauaaaagcagcaacagaaauaaagaaauaaaugaaauucaaaaugaaauaaauauuguguugugcagcauuaaaaaaucaauaaaaauuaaaaaugagcaagaucuaaaaaaaaaaaaaaaaaaaaaaaaaaaaaaaaaaaaaaaaaaaaaaaaaaaaaaaaaaaaaaaaugcaucccccccccccccccccccccccccccccccaaaggcucuuuucagagccaccagaauu

SEQ ID NO: 19700 - RNA, 1913 nt, Artificial Sequence
  mRNA product Design f-2 comprising derived and/or modified sequence from HRSV(Memphis-37)__AIY60640.1__F-del_DSCav1_mut8 (opt1)
gggagagcggcucggccauuuugucccagucaguccggaggcugcggcugcagaaguaccgccugcggaguaacugcaaagaagcuuaccauggagcugcccauccucaagaccaacgccaucaccacgauccuggccgcggugacccugugcuucgccagcucccagaacaucaccgaggaguucuaccagagcacgugcuccgccgucagcaagggcuaccucggcgcccugcgcaccgggugguacaccagcgugaucaccaucgagcuguccaacaucaaggagaucaagugcaacggcaccgacgccaaggugaagcucaucaagcaggagcuggacaaguacaagaacgcggucacggaccugcagcuccugaugcagagcaccccggccgccggcuccgggagcgcgaucgccuccggcaucgccgucugcaaggugcugcaccucgagggcgaggugaacaagaucaagaacgcccugcuguccaccaacaaggccgucgugagccucuccggcugcggggugagcguccugaccuucaaggugcuggaccucaagaacuacaucgacaagcagcugcugcccauccugaacaagcagagcugcuccauccccaacaucgagaccgucaucgaguuccagcagaagaacaaccgccuccuggagaucacgcgggaguucagcgugaacgcgggcgugaccacccccgucuccaccuacaugcugacgaacagcgagcuccugucccugaucaacgacaugccgaucaccaacgaccagaagaagcucaugagcaacaacgugcagaucgugcgccagcaguccuacagcaucaugugcaucaucaaggaggagguccuggccuacguggugcagcugccccucuacggggucaucgacacccccugcuggaagcugcacaccagcccccugugcacgaccaacaccaaggagggcuccaacaucugccucacccggacggaccgcgggugguacugcgacaacgccggcagcguguccuucuucccgcaggccgagaccugcaagguccagagcaaccggguguucugcgacaccaugaacucccugacccugcccagcgaggugaaccucugcaacaucgacaucuucaaccccaaguacgacugcaagaucaugacguccaagaccgacgucagcuccagcgugaucaccucccugggcgccaucgugagcugcuacgggaagaccaagugcacggcgagcaacaagugccgcggcaucaucaagaccuucuccaacgggugcgacuacgucagcaacaagggcguggacaccguguccgucggcaacacccuguacuacgugaacaagcaggagggccagagccucuacgugaagggggagcccaucaucaacuucuacgacccgcuggucuuccccuccgacgaguucgacgccagcaucucccaggugaacgagaagaucaaccagagccuggccuucauccggaaguccgacgagcuccugcacaacgugaacgucggcaagagcaccacgaacaucaugaucaccaccaucaucaucgugaucaucgugauccugcugcuccugaucgccgucgggcuguuccucuacugcaaggcccgcugaggacuaguggaagcauuuuccuggcugauuaaaagaaauuacucagcuauggucaucuguuccuguuagaaggcuaugcagcauauuauauacuaugcgcauguuaugaaaugcauaauaaaaaauuuuaaaaaaucuaaaagaucuaaaaaaaaaaaaaaaaaaaaaaaaaaaaaaaaaaaaaaaaaaaaaaaaaaaaaaaaaaaaaaaaugcaucccccccccccccccccccccccccccccccaaaggcucuuuucagagccaccagaauu

SEQ ID NO: 19701 - RNA, 1913 nt, Artificial Sequence
  mRNA product Design f-2 comprising derived and/or modified sequence from HRSV(Memphis-37)__AIY60640.1__F-del_DSCav1_mut8 (opt1)
gggagagcggcucggccauuuugucccagucaguccggaggcugcggcugcagaaguaccgccugcggaguaacugcaaagaagcuuaccauggagcugcccauccucaagaccaacgccaucaccacgauccuggccgcggugacccugugcuucgccagcucccagaacaucaccgaggaguucuaccagagcacgugcuccgccgucagcaagggcuaccucggggcccugcgcaccggcugguacaccuccgugaucaccaucgagcugagcaacaucaaggagaucaagugcaacgggaccgacgccaaggugaagcucaucaagcaggagcuggacaaguacaagaacgcggucacggaccugcagcuccugaugcaguccaccccggccgccggcagcggguccgccaucgcgagcggcaucgccgugugcaaggugcugcaccucgagggcgaggucaacaagaucaagaacgcccugcuguccaccaacaaggccguggugagccucuccgggugcggcgucagcgugcugaccuucaaggugcuggaccucaagaacuacaucgacaagcagcugcugcccauccucaacaagcaguccugcagcauccccaacaucgagacggucaucgaguuccagcagaagaacaaccggcugcuggagaucacccgcgaguucuccgugaacgccggggugaccacccccgucagcacguacaugcucaccaacuccgagcugcugagccucaucaacgacaugccgaucaccaacgaccagaagaagcugaugagcaacaacgugcagaucgugcggcagcaguccuacagcaucaugugcaucaucaaggaggagguccuggcguacguggugcagcucccccuguacggcgucaucgacacccccugcuggaagcugcacacgagcccccucugcaccaccaacaccaaggagggguccaacaucugccugacgcgcaccgaccggggcugguacugcgacaacgccggcuccgugagcuucuucccgcaggccgagaccugcaaggugcaguccaaccgcgucuucugcgacaccaugaacagccugacgcuccccuccgaggugaaccugugcaacaucgacaucuucaaccccaaguacgacugcaagaucaugaccagcaagaccgacgucuccagcuccgugaucaccagccugggggccaucguguccugcuacggcaagacgaagugcaccgccagcaacaagugccgggggaucaucaagaccuucuccaacggcugcgacuacgucagcaacaagggcguggacaccguguccgucgggaacacgcucuacuacgugaacaagcaggagggccagagccuguacgugaagggggagcccaucaucaacuucuacgacccgcuggucuuccccagcgacgaguucgacgcguccaucagccaggugaacgagaagaucaaccagucccucgccuucauccgcaagagcgacgagcugcugcacaacgugaacgucggcaaguccaccaccaacaucaugaucaccaccaucaucaucgugaucaucgugauccuccugcugcucaucgccgucgggcuguuccuguacugcaaggcccggugaggacuaguggaagcauuuuccuggcugauuaaaagaaauuacucagcuauggucaucuguuccuguuagaaggcuaugcagcauauuauauacuaugcgcauguuaugaaaugcauaauaaaaaauuuuaaaaaaucuaaaagaucuaaaaaaaaaaaaaaaaaaaaaaaaaaaaaaaaaaaaaaaaaaaaaaaaaaaaaaaaaaaaaaaaugcaucccccccccccccccccccccccccccccccaaaggcucuuuucagagccaccagaauu

SEQ ID NO: 19702 - RNA, 1913 nt, Artificial Sequence
  mRNA product Design f-2 comprising derived and/or modified sequence from HRSV(Memphis-37)__AIY60640.1__F-del_DSCav1_mut8 (opt2)
gggagagcggcucggccauuuugucccagucaguccggaggcugcggcugcagaaguaccgccugcggaguaacugcaaagaagcuuaccauggagcuccccauccucaagaccaacgccaucaccaccauccucgccgccgucacccucugcuucgccuccucccagaacaucaccgaggaguucuaccaguccaccugcuccgccgucuccaagggcuaccucggcgcccuccgcaccggcugguacaccuccgucaucaccaucgagcucuccaacaucaaggagaucaagugcaacggcaccgacgccaaggucaagcucaucaagcaggagcucgacaaguacaagaacgccgucaccgaccuccagcuccucaugcaguccacccccgccgccggcuccggcuccgccaucgccuccggcaucgccgucugcaagguccuccaccucgagggcgaggucaacaagaucaagaacgcccuccucuccaccaacaaggccgucgucucccucuccggcugcggcgucuccguccucaccuucaagguccucgaccucaagaacuacaucgacaagcagcuccuccccauccucaacaagcaguccugcuccauccccaacaucgagaccgucaucgaguuccagcagaagaacaaccgccuccucgagaucacccgcgaguucuccgucaacgccggcgucaccacccccgucuccaccuacaugcucaccaacuccgagcuccucucccucaucaacgacaugcccaucaccaacgaccagaagaagcucauguccaacaacguccagaucguccgccagcaguccuacuccaucaugugcaucaucaaggaggagguccucgccuacgucguccagcucccccucuacggcgucaucgacacccccugcuggaagcuccacaccuccccccucugcaccaccaacaccaaggagggcuccaacaucugccucacccgcaccgaccgcggcugguacugcgacaacgccggcuccgucuccuucuucccccaggccgagaccugcaagguccaguccaaccgcgucuucugcgacaccaugaacucccucacccuccccuccgaggucaaccucugcaacaucgacaucuucaaccccaaguacgacugcaagaucaugaccuccaagaccgacgucuccuccuccgucaucaccucccucggcgccaucgucuccugcuacggcaagaccaagugcaccgccuccaacaagugccgcggcaucaucaagaccuucuccaacggcugcgacuacgucuccaacaagggcgucgacaccgucuccgucggcaacacccucuacuacgucaacaagcaggagggccagucccucuacgucaagggcgagcccaucaucaacuucuacgacccccucgucuuccccuccgacgaguucgacgccuccaucucccaggucaacgagaagaucaaccagucccucgccuucauccgcaaguccgacgagcuccuccacaacgucaacgucggcaaguccaccaccaacaucaugaucaccaccaucaucaucgucaucaucgucauccuccuccuccucaucgccgucggccucuuccucuacugcaaggcccgcugaggacuaguggaagcauuuuccuggcugauuaaaagaaauuacucagcuauggucaucuguuccuguuagaaggcuaugcagcauauuauauacuaugcgcauguuaugaaaugcauaauaaaaaauuuuaaaaaaucuaaaagaucuaaaaaaaaaaaaaaaaaaaaaaaaaaaaaaaaaaaaaaaaaaaaaaaaaaaaaaaaaaaaaaaaugcaucccccccccccccccccccccccccccccccaaaggcucuuuucagagccaccagaauu

SEQ ID NO: 19703 - RNA, 1913 nt, Artificial Sequence
  mRNA product Design f-2 comprising derived and/or modified sequence from HRSV(Memphis-37)__AIY60640.1__F-del_DSCav1_mut8 (opt3)
gggagagcggcucggccauuuugucccagucaguccggaggcugcggcugcagaaguaccgccugcggaguaacugcaaagaagcuuaccauggagcugcccauccucaagaccaacgccauuacaacuauacuugcugcagugacgcugugcuucgccagcucccagaauaucaccgaagaguuuuaccaaucuacauguucagcggucaguaaaggcuauuugggggcuuuaagaacuggaugguacaccagcguuauuacaaucgaacuguccaacauuaaggagaucaaaugcaaugguaccgacgccaaggugaaacuaauaaagcaggaacucgauaaguauaaaaacgcaguaacugaccugcagcuucugaugcagucuacuccugccgcuggcucggggucagcaaucgccagcggaauugcuguguguaaggucuugcaccucgagggcgaggugaauaaaaucaagaacgcccugcugaguaccaauaaagcgguugugucccucucugguugcggggucagcguguuaacguucaagguacuggaucuuaagaacuacauugacaaacaauugcugccaauccuaaauaagcaguccuguucaauaccgaacauugaaacuguuaucgaguuucagcagaaaaauaacaggcuccuggaaauuacccgggaguucagugugaaugcaggagucacaacucccgugagcaccuauaugcuuacaaacucugagcuguugucccucaucaaugauaugccuaucaccaacgaccaaaagaaacugaugucaaacaaugugcagauuguccgccagcagagcuacaguauaaugugcaucauuaaggaagagguuuuagccuaugugguacaacugccacucuacggcgugaucgauacgcccuguuggaaacuucauacuucuccucugugcacaaccaacacuaaggaaggcuccaauauauguuugacacgaaccgaccgugggugguacugcgauaacgcuggaagcgucucguuuuucccacaggccgagacguguaaggugcagucuaauagaguuuucugcgacaccaugaacucccuaacacugcccucagaagugaaucucugcaacauugauaucuucaauccuaaauaugacuguaagaucaugacaaguaaaaccgaugucagcuccucugugauuacaagccugggugcaaucguaucaugcuacggcaagacuaaauguaccgcuaguaacaagugcagggggauuauaaagacauuuuccaauggaugugacuauguuagcaacaaaggcguggacaccgucucuguggguaauacucuuuacuaugucaacaagcaagaggggcagucacuguacgugaaaggagagccaaucauuaauuucuaugauccguugguuuuucccagugacgaauuugaugccagcaucucccaggugaacgagaagaucaaccagucucucgcguuuauucggaaaucggacgaacuguuacacaauguaaacgucggcaagagcacgacaaauauaaugaucaccacuauuaucauugugaucauaguuauccugcuacuccugauugccgugggccuuuucuuguacugcaaggcacgcugaggacuaguggaagcauuuuccuggcugauuaaaagaaauuacucagcuauggucaucuguuccuguuagaaggcuaugcagcauauuauauacuaugcgcauguuaugaaaugcauaauaaaaaauuuuaaaaaaucuaaaagaucuaaaaaaaaaaaaaaaaaaaaaaaaaaaaaaaaaaaaaaaaaaaaaaaaaaaaaaaaaaaaaaaaugcaucccccccccccccccccccccccccccccccaaaggcucuuuucagagccaccagaauu

SEQ ID NO: 19704 - RNA, 1913 nt, Artificial Sequence
  mRNA product Design f-2 comprising derived and/or modified sequence from HRSV(Memphis-37)__AIY60640.1__F-del_DSCav1_mut8 (opt4)
gggagagcggcucggccauuuugucccagucaguccggaggcugcggcugcagaaguaccgccugcggaguaacugcaaagaagcuuaccauggagcugcccauccugaagaccaacgccaucaccaccauccuggccgccgugacccugugcuucgccagcagccagaacaucaccgaggaguucuaccagagcaccugcagcgccgugagcaagggcuaccugggcgcccugagaaccggcugguacaccagcgugaucaccaucgagcugagcaacaucaaggagaucaagugcaacggcaccgacgccaaggugaagcugaucaagcaggagcuggacaaguacaagaacgccgugaccgaccugcagcugcugaugcagagcacccccgccgccggcagcggcagcgccaucgccagcggcaucgccgugugcaaggugcugcaccuggagggcgaggugaacaagaucaagaacgcccugcugagcaccaacaaggccguggugagccugagcggcugcggcgugagcgugcugaccuucaaggugcuggaccugaagaacuacaucgacaagcagcugcugcccauccugaacaagcagagcugcagcauccccaacaucgagaccgugaucgaguuccagcagaagaacaacagacugcuggagaucaccagagaguucagcgugaacgccggcgugaccacccccgugagcaccuacaugcugaccaacagcgagcugcugagccugaucaacgacaugcccaucaccaacgaccagaagaagcugaugagcaacaacgugcagaucgugagacagcagagcuacagcaucaugugcaucaucaaggaggaggugcuggccuacguggugcagcugccccuguacggcgugaucgacacccccugcuggaagcugcacaccagcccccugugcaccaccaacaccaaggagggcagcaacaucugccugaccagaaccgacagaggcugguacugcgacaacgccggcagcgugagcuucuucccccaggccgagaccugcaaggugcagagcaacagaguguucugcgacaccaugaacagccugacccugcccagcgaggugaaccugugcaacaucgacaucuucaaccccaaguacgacugcaagaucaugaccagcaagaccgacgugagcagcagcgugaucaccagccugggcgccaucgugagcugcuacggcaagaccaagugcaccgccagcaacaagugcagaggcaucaucaagaccuucagcaacggcugcgacuacgugagcaacaagggcguggacaccgugagcgugggcaacacccuguacuacgugaacaagcaggagggccagagccuguacgugaagggcgagcccaucaucaacuucuacgacccccugguguuccccagcgacgaguucgacgccagcaucagccaggugaacgagaagaucaaccagagccuggccuucaucagaaagagcgacgagcugcugcacaacgugaacgugggcaagagcaccaccaacaucaugaucaccaccaucaucaucgugaucaucgugauccugcugcugcugaucgccgugggccuguuccuguacugcaaggccagaugaggacuaguggaagcauuuuccuggcugauuaaaagaaauuacucagcuauggucaucuguuccuguuagaaggcuaugcagcauauuauauacuaugcgcauguuaugaaaugcauaauaaaaaauuuuaaaaaaucuaaaagaucuaaaaaaaaaaaaaaaaaaaaaaaaaaaaaaaaaaaaaaaaaaaaaaaaaaaaaaaaaaaaaaaaugcaucccccccccccccccccccccccccccccccaaaggcucuuuucagagccaccagaauu

SEQ ID NO: 19705 - RNA, 1913 nt, Artificial Sequence
  mRNA product Design f-2 comprising derived and/or modified sequence from HRSV(Memphis-37)__AIY60640.1__F-del_DSCav1_mut8 (opt5)
gggagagcggcucggccauuuugucccagucaguccggaggcugcggcugcagaaguaccgccugcggaguaacugcaaagaagcuuaccauggagcugcccauccucaagaccaacgccauuacaacgauccuggcugccgugacccuuugcuucgcgagcucccagaauauuacagaagaguuuuaccaaucuaccuguagcgcugucuccaaaggcuaucugggggcccucagaacaggaugguacaccucuguuaucacaauugaacugagcaacaucaaggagaucaaaugcaauggcaccgacgccaaggugaaacuuauuaagcaggaacuggauaaguauaaaaacgcugugacggaccuccagcugcugaugcaguccaccccugccgcugggucuggaagcgccaucgcguccggcauugccgucuguaaggugcuccaccuggagggggagguuaauaaaaucaagaacgcccuucugagcacaaauaaagcuguggucucucucuccggaugcggcgugagcguucugaccuucaaggugcuugaucugaagaacuacauugacaaacaacuccugccgauccugaauaagcagucuuguuccauucccaacaucgaaacagucaucgaguuucagcagaaaaauaaccggcuccuggaaauuacccgcgaguucagcgugaaugcuggcgugacgacaccugucucuaccuauaugcuuacaaacuccgagcugcucagccugaucaaugauaugcccauuaccaacgaccaaaagaaacuuauguccaacaauguucagaucgugagacagcagucuuacagcauuaugugcaucaucaaggaagaggugcuggccuaugucgugcaacucccucuguacgggguuauugauacccccuguuggaaacugcauacauccccucucugcacgaccaacacaaaggaaggaagcaauaucugucugacccggacagaccgcggcugguacugcgauaacgcggggucuguguccuuuuucccgcaggccgagaccuguaagguccagagcaauagaguguuuugcgacacgaugaacucucuuacacugcccagcgaaguuaaucucugcaacauugauaucuucaauccuaaauaugacuguaagauuaugaccuccaaaaccgaugugucuagcuccgucaucacaagccugggagcuaucgugucuugcuacggcaagaccaaauguacagccuccaacaagugccgggggauuaucaagacguuuagcaauggaugugacuaugucucuaacaaaggcguggacaccguuuccgugggcaauacacuuuacuaugucaacaagcaagaggggcagagccuguacgugaaaggagagcccauuaucaauuucuaugauccucucguuuuucccuccgacgaguucgaugcuucuauuagccaggugaacgaaaagaucaaccagucccuggccuuuauucgcaaaucugacgaacugcuccacaaugucaacgugggcaagagcaccacaaauaucaugaucaccacgauuaucauugugaucauuguuauccugcuucugcucaucgccgucgggcuguuccuguacugcaaggcuagaugaggacuaguggaagcauuuuccuggcugauuaaaagaaauuacucagcuauggucaucuguuccuguuagaaggcuaugcagcauauuauauacuaugcgcauguuaugaaaugcauaauaaaaaauuuuaaaaaaucuaaaagaucuaaaaaaaaaaaaaaaaaaaaaaaaaaaaaaaaaaaaaaaaaaaaaaaaaaaaaaaaaaaaaaaaugcaucccccccccccccccccccccccccccccccaaaggcucuuuucagagccaccagaauu

SEQ ID NO: 19706 - RNA, 1913 nt, Artificial Sequence
  mRNA product Design f-2 comprising derived and/or modified sequence from HRSV(Memphis-37)__AIY60640.1__F-del_DSCav1_mut8 (opt6)
gggagagcggcucggccauuuugucccagucaguccggaggcugcggcugcagaaguaccgccugcggaguaacugcaaagaagcuuaccauggaacuacccauacuaaaaacaaacgcaauuacaacaauacuugccgcaguaaccuuaugcuuugccucaucccaaaacauaacagaagaauuuuaucaaucaacaugcuccgcaguaucaaaaggauaccuaggcgcucuaagaacaggaugguacacauccguaaucacaauagaacuauccaauauaaaagaaauaaaauguaauggaacagaugcaaaaguuaaauuaauaaaacaagaacuagacaaauacaaaaacgcaguuaccgaucuccaacuauuaaugcaaucaacaccagcugcaggaaguggaagcgccauagcaagcggaauagcagucugcaaaguauuacaucuugaaggcgaaguaaacaaaaucaaaaaugcccuccucucaacaaacaaagcuguaguaucccuaucaggaugcgguguaucuguucuuacauuuaaaguacucgaucuaaaaaacuacaucgauaaacaguuacuuccaauacucaacaaacaaucauguagcauaccaaacauagaaacaguaauagaauuucaacaaaaaaacaaucgacuacucgaaauaacuagagaauuuucuguaaacgcuggaguaaccacaccagugucuaccuauaugcuuacaaauagcgaacuccuaucacuaaucaaugacaugccaauaacaaaugaccagaaaaaacucaugucaaauaacguacaaauaguacgacaacaaagcuacuccauaaugugcauaaucaaagaagaaguauuagccuacguuguucaacuaccauuauauggaguuauagacacuccaugcuggaaauuacauacaagcccacucuguacaacaaacacaaaagaaggcucaaacauaugcuuaacaagaacagauagaggaugguacugcgauaacgcaggcucagucucauuuuuuccacaagccgaaaccugcaaaguacaaucaaauagaguuuuuugcgacacaaugaacucacucacucuaccaagugaaguaaaucucuguaauaucgacauauucaacccaaaauaugacugcaaaauaaugacaucuaaaaccgauguauccucaagcguaaucacaucauuaggagcuauaguuuccugcuacgguaaaacaaaaugcacagcauccaacaaaugucgcgguaucaucaaaacauucuccaacggaugugauuacguaucaaacaaaggugucgacaccguaagcguaggcaacacuuuauacuauguaaacaaacaagaaggacaaagucuauauguaaaaggagaaccaauaauaaacuucuaugacccccuaguauucccuuccgacgaauuugaugcaagcauuucacaaguuaacgaaaaaaucaaucaaucccuugcuuucauaagaaaaucagacgaauuacuacacaacguaaacguaggaaaaagcacaacaaauaucaugauuacaacaauaauaauuguaauaauaguaauacuccucuuacuuauagcagucggcuuauuccuuuacugcaaagcaagauaaggacuaguggaagcauuuuccuggcugauuaaaagaaauuacucagcuauggucaucuguuccuguuagaaggcuaugcagcauauuauauacuaugcgcauguuaugaaaugcauaauaaaaaauuuuaaaaaaucuaaaagaucuaaaaaaaaaaaaaaaaaaaaaaaaaaaaaaaaaaaaaaaaaaaaaaaaaaaaaaaaaaaaaaaaugcaucccccccccccccccccccccccccccccccaaaggcucuuuucagagccaccagaauu

SEQ ID NO: 19707 - RNA, 1913 nt, Artificial Sequence
  mRNA product Design f-2 comprising derived and/or modified sequence from HRSV(Memphis-37)__AIY60640.1__F-del_DSCav1_mut8 (opt11)
gggagagcggcucggccauuuugucccagucaguccggaggcugcggcugcagaaguaccgccugcggaguaacugcaaagaagcuuaccauggaacuccccauccuaaaaaccaacgcaaucaccaccauccucgccgccguaacacucugcuuugcaagcucccaaaacaucaccgaagaauuuuaccaaucuaccugcagcgccguaucuaaaggauaccuaggagcccucagaaccgguugguacaccucugucaucacaauagaacucuccaacaucaaagaaaucaaaugcaacggcaccgacgccaaagucaaacucaucaaacaagaacucgacaaauauaaaaacgccguaaccgaccuccaacuccucaugcaauccacccccgccgccggcaguggcuccgcuaucgccuccggaaucgccguuugcaaaguccugcaccuagaaggcgaagucaacaaaaucaaaaacgcccugcucucaaccaacaaagcugucguaagccucuccggcugcggagucuccguccuuaccuucaaaguacucgaccuuaaaaacuacaucgacaaacaacuucuccccauacucaauaaacaauccugcuccauacccaacaucgaaacagucaucgaguuccaacagaaaaauaaccgccuccucgaaauaacccgcgaguucuccgucaacgcaggcgucaccaccccagucuccaccuacaugcugacaaacuccgaacuccuaucccucaucaacgacaugcccaucaccaacgaccaaaagaaacucaugagcaauaacguccaaaucguacgacaacaauccuacagcaucauguguaucaucaaagaagaaguacucgccuacgucguccaacucccacuauacggcgucaucgacacaccaugcuggaaacuucacaccuccccacucugcaccacaaacacaaaagaaggcuccaacaucugccuuacccgaaccgaccgcgggugguacugcgacaacgccggaucagucucguucuuuccccaagccgaaaccugcaaaguacaaucaaaucgcgucuucugcgacaccaugaacuccuuaacacuaccauccgaaguaaaccucugcaacauagacaucuucaacccaaaauacgacugcaaaaucaugaccuccaaaaccgacguauccuccuccguaaucaccagccucggcgcaauagucucaugcuacggcaaaaccaaaugcaccgccuccaacaaaugccgcggcaucauaaaaacuuucucuaacggaugcgacuacgucagcaacaaaggcgucgacaccguauccguagguaauacacuuuacuacgucaauaaacaagaaggccaaucccucuacgucaaaggagaacccaucauaaacuucuacgacccccucgucuuccccuccgacgaguucgacgccuccaucagccaggucaacgaaaagaucaaccaaucacucgccuucauccgcaaaagcgacgaacuccuccacaacguaaacgucggcaaauccacaaccaacauaaugaucaccacuaucaucaucgugauaaucgucauuuuacuucuccucaucgccguaggccucuuccuauacugcaaagcccgcuaaggacuaguggaagcauuuuccuggcugauuaaaagaaauuacucagcuauggucaucuguuccuguuagaaggcuaugcagcauauuauauacuaugcgcauguuaugaaaugcauaauaaaaaauuuuaaaaaaucuaaaagaucuaaaaaaaaaaaaaaaaaaaaaaaaaaaaaaaaaaaaaaaaaaaaaaaaaaaaaaaaaaaaaaaaugcaucccccccccccccccccccccccccccccccaaaggcucuuuucagagccaccagaauu

SEQ ID NO: 19708 - RNA, 1904 nt, Artificial Sequence
  mRNA product Design f-3 comprising derived and/or modified sequence from HRSV(Memphis-37)__AIY60640.1__F-del_DSCav1_mut8 (opt1)
gggagagucccgcagucggcguccagcggcucugcuuguucgugugugugucguugcaggccuuauucaagcuuaccauggagcugcccauccucaagaccaacgccaucaccacgauccuggccgcggugacccugugcuucgccagcucccagaacaucaccgaggaguucuaccagagcacgugcuccgccgucagcaagggcuaccucggcgcccugcgcaccgggugguacaccagcgugaucaccaucgagcuguccaacaucaaggagaucaagugcaacggcaccgacgccaaggugaagcucaucaagcaggagcuggacaaguacaagaacgcggucacggaccugcagcuccugaugcagagcaccccggccgccggcuccgggagcgcgaucgccuccggcaucgccgucugcaaggugcugcaccucgagggcgaggugaacaagaucaagaacgcccugcuguccaccaacaaggccgucgugagccucuccggcugcggggugagcguccugaccuucaaggugcuggaccucaagaacuacaucgacaagcagcugcugcccauccugaacaagcagagcugcuccauccccaacaucgagaccgucaucgaguuccagcagaagaacaaccgccuccuggagaucacgcgggaguucagcgugaacgcgggcgugaccacccccgucuccaccuacaugcugacgaacagcgagcuccugucccugaucaacgacaugccgaucaccaacgaccagaagaagcucaugagcaacaacgugcagaucgugcgccagcaguccuacagcaucaugugcaucaucaaggaggagguccuggccuacguggugcagcugccccucuacggggucaucgacacccccugcuggaagcugcacaccagcccccugugcacgaccaacaccaaggagggcuccaacaucugccucacccggacggaccgcgggugguacugcgacaacgccggcagcguguccuucuucccgcaggccgagaccugcaagguccagagcaaccggguguucugcgacaccaugaacucccugacccugcccagcgaggugaaccucugcaacaucgacaucuucaaccccaaguacgacugcaagaucaugacguccaagaccgacgucagcuccagcgugaucaccucccugggcgccaucgugagcugcuacgggaagaccaagugcacggcgagcaacaagugccgcggcaucaucaagaccuucuccaacgggugcgacuacgucagcaacaagggcguggacaccguguccgucggcaacacccuguacuacgugaacaagcaggagggccagagccucuacgugaagggggagcccaucaucaacuucuacgacccgcuggucuuccccuccgacgaguucgacgccagcaucucccaggugaacgagaagaucaaccagagccuggccuucauccggaaguccgacgagcuccugcacaacgugaacgucggcaagagcaccacgaacaucaugaucaccaccaucaucaucgugaucaucgugauccugcugcuccugaucgccgucgggcuguuccucuacugcaaggcccgcugaggacuaguacuggcugcaucucccuuuccucuguccuccauccuucucccaggauggugaagggggaccugguacccagugauccccaccccaggauccuaaaucaugacuuaccugcuaauaaaaacucauuggaaaagugagaagaucuaaaaaaaaaaaaaaaaaaaaaaaaaaaaaaaaaaaaaaaaaaaaaaaaaaaaaaaaaaaaaaaaugcaucccccccccccccccccccccccccccccccaaaggcucuuuucagagccaccagaauu

SEQ ID NO: 19709 - RNA, 1904 nt, Artificial Sequence
  mRNA product Design f-3 comprising derived and/or modified sequence from HRSV(Memphis-37)__AIY60640.1__F-del_DSCav1_mut8 (opt1)
gggagagucccgcagucggcguccagcggcucugcuuguucgugugugugucguugcaggccuuauucaagcuuaccauggagcugcccauccucaagaccaacgccaucaccacgauccuggccgcggugacccugugcuucgccagcucccagaacaucaccgaggaguucuaccagagcacgugcuccgccgucagcaagggcuaccucggggcccugcgcaccggcugguacaccuccgugaucaccaucgagcugagcaacaucaaggagaucaagugcaacgggaccgacgccaaggugaagcucaucaagcaggagcuggacaaguacaagaacgcggucacggaccugcagcuccugaugcaguccaccccggccgccggcagcggguccgccaucgcgagcggcaucgccgugugcaaggugcugcaccucgagggcgaggucaacaagaucaagaacgcccugcuguccaccaacaaggccguggugagccucuccgggugcggcgucagcgugcugaccuucaaggugcuggaccucaagaacuacaucgacaagcagcugcugcccauccucaacaagcaguccugcagcauccccaacaucgagacggucaucgaguuccagcagaagaacaaccggcugcuggagaucacccgcgaguucuccgugaacgccggggugaccacccccgucagcacguacaugcucaccaacuccgagcugcugagccucaucaacgacaugccgaucaccaacgaccagaagaagcugaugagcaacaacgugcagaucgugcggcagcaguccuacagcaucaugugcaucaucaaggaggagguccuggcguacguggugcagcucccccuguacggcgucaucgacacccccugcuggaagcugcacacgagcccccucugcaccaccaacaccaaggagggguccaacaucugccugacgcgcaccgaccggggcugguacugcgacaacgccggcuccgugagcuucuucccgcaggccgagaccugcaaggugcaguccaaccgcgucuucugcgacaccaugaacagccugacgcuccccuccgaggugaaccugugcaacaucgacaucuucaaccccaaguacgacugcaagaucaugaccagcaagaccgacgucuccagcuccgugaucaccagccugggggccaucguguccugcuacggcaagacgaagugcaccgccagcaacaagugccgggggaucaucaagaccuucuccaacggcugcgacuacgucagcaacaagggcguggacaccguguccgucgggaacacgcucuacuacgugaacaagcaggagggccagagccuguacgugaagggggagcccaucaucaacuucuacgacccgcuggucuuccccagcgacgaguucgacgcguccaucagccaggugaacgagaagaucaaccagucccucgccuucauccgcaagagcgacgagcugcugcacaacgugaacgucggcaaguccaccaccaacaucaugaucaccaccaucaucaucgugaucaucgugauccuccugcugcucaucgccgucgggcuguuccuguacugcaaggcccggugaggacuaguacuggcugcaucucccuuuccucuguccuccauccuucucccaggauggugaagggggaccugguacccagugauccccaccccaggauccuaaaucaugacuuaccugcuaauaaaaacucauuggaaaagugagaagaucuaaaaaaaaaaaaaaaaaaaaaaaaaaaaaaaaaaaaaaaaaaaaaaaaaaaaaaaaaaaaaaaaugcaucccccccccccccccccccccccccccccccaaaggcucuuuucagagccaccagaauu

SEQ ID NO: 19710 - RNA, 1904 nt, Artificial Sequence
  mRNA product Design f-3 comprising derived and/or modified sequence from HRSV(Memphis-37)__AIY60640.1__F-del_DSCav1_mut8 (opt2)
gggagagucccgcagucggcguccagcggcucugcuuguucgugugugugucguugcaggccuuauucaagcuuaccauggagcuccccauccucaagaccaacgccaucaccaccauccucgccgccgucacccucugcuucgccuccucccagaacaucaccgaggaguucuaccaguccaccugcuccgccgucuccaagggcuaccucggcgcccuccgcaccggcugguacaccuccgucaucaccaucgagcucuccaacaucaaggagaucaagugcaacggcaccgacgccaaggucaagcucaucaagcaggagcucgacaaguacaagaacgccgucaccgaccuccagcuccucaugcaguccacccccgccgccggcuccggcuccgccaucgccuccggcaucgccgucugcaagguccuccaccucgagggcgaggucaacaagaucaagaacgcccuccucuccaccaacaaggccgucgucucccucuccggcugcggcgucuccguccucaccuucaagguccucgaccucaagaacuacaucgacaagcagcuccuccccauccucaacaagcaguccugcuccauccccaacaucgagaccgucaucgaguuccagcagaagaacaaccgccuccucgagaucacccgcgaguucuccgucaacgccggcgucaccacccccgucuccaccuacaugcucaccaacuccgagcuccucucccucaucaacgacaugcccaucaccaacgaccagaagaagcucauguccaacaacguccagaucguccgccagcaguccuacuccaucaugugcaucaucaaggaggagguccucgccuacgucguccagcucccccucuacggcgucaucgacacccccugcuggaagcuccacaccuccccccucugcaccaccaacaccaaggagggcuccaacaucugccucacccgcaccgaccgcggcugguacugcgacaacgccggcuccgucuccuucuucccccaggccgagaccugcaagguccaguccaaccgcgucuucugcgacaccaugaacucccucacccuccccuccgaggucaaccucugcaacaucgacaucuucaaccccaaguacgacugcaagaucaugaccuccaagaccgacgucuccuccuccgucaucaccucccucggcgccaucgucuccugcuacggcaagaccaagugcaccgccuccaacaagugccgcggcaucaucaagaccuucuccaacggcugcgacuacgucuccaacaagggcgucgacaccgucuccgucggcaacacccucuacuacgucaacaagcaggagggccagucccucuacgucaagggcgagcccaucaucaacuucuacgacccccucgucuuccccuccgacgaguucgacgccuccaucucccaggucaacgagaagaucaaccagucccucgccuucauccgcaaguccgacgagcuccuccacaacgucaacgucggcaaguccaccaccaacaucaugaucaccaccaucaucaucgucaucaucgucauccuccuccuccucaucgccgucggccucuuccucuacugcaaggcccgcugaggacuaguacuggcugcaucucccuuuccucuguccuccauccuucucccaggauggugaagggggaccugguacccagugauccccaccccaggauccuaaaucaugacuuaccugcuaauaaaaacucauuggaaaagugagaagaucuaaaaaaaaaaaaaaaaaaaaaaaaaaaaaaaaaaaaaaaaaaaaaaaaaaaaaaaaaaaaaaaaugcaucccccccccccccccccccccccccccccccaaaggcucuuuucagagccaccagaauu

SEQ ID NO: 19711 - RNA, 1904 nt, Artificial Sequence
  mRNA product Design f-3 comprising derived and/or modified sequence from HRSV(Memphis-37)__AIY60640.1__F-del_DSCav1_mut8 (opt3)
gggagagucccgcagucggcguccagcggcucugcuuguucgugugugugucguugcaggccuuauucaagcuuaccauggagcugcccauccucaagaccaacgccauuacaacuauacuugcugcagugacgcugugcuucgccagcucccagaauaucaccgaagaguuuuaccaaucuacauguucagcggucaguaaaggcuauuugggggcuuuaagaacuggaugguacaccagcguuauuacaaucgaacuguccaacauuaaggagaucaaaugcaaugguaccgacgccaaggugaaacuaauaaagcaggaacucgauaaguauaaaaacgcaguaacugaccugcagcuucugaugcagucuacuccugccgcuggcucggggucagcaaucgccagcggaauugcuguguguaaggucuugcaccucgagggcgaggugaauaaaaucaagaacgcccugcugaguaccaauaaagcgguugugucccucucugguugcggggucagcguguuaacguucaagguacuggaucuuaagaacuacauugacaaacaauugcugccaauccuaaauaagcaguccuguucaauaccgaacauugaaacuguuaucgaguuucagcagaaaaauaacaggcuccuggaaauuacccgggaguucagugugaaugcaggagucacaacucccgugagcaccuauaugcuuacaaacucugagcuguugucccucaucaaugauaugccuaucaccaacgaccaaaagaaacugaugucaaacaaugugcagauuguccgccagcagagcuacaguauaaugugcaucauuaaggaagagguuuuagccuaugugguacaacugccacucuacggcgugaucgauacgcccuguuggaaacuucauacuucuccucugugcacaaccaacacuaaggaaggcuccaauauauguuugacacgaaccgaccgugggugguacugcgauaacgcuggaagcgucucguuuuucccacaggccgagacguguaaggugcagucuaauagaguuuucugcgacaccaugaacucccuaacacugcccucagaagugaaucucugcaacauugauaucuucaauccuaaauaugacuguaagaucaugacaaguaaaaccgaugucagcuccucugugauuacaagccugggugcaaucguaucaugcuacggcaagacuaaauguaccgcuaguaacaagugcagggggauuauaaagacauuuuccaauggaugugacuauguuagcaacaaaggcguggacaccgucucuguggguaauacucuuuacuaugucaacaagcaagaggggcagucacuguacgugaaaggagagccaaucauuaauuucuaugauccguugguuuuucccagugacgaauuugaugccagcaucucccaggugaacgagaagaucaaccagucucucgcguuuauucggaaaucggacgaacuguuacacaauguaaacgucggcaagagcacgacaaauauaaugaucaccacuauuaucauugugaucauaguuauccugcuacuccugauugccgugggccuuuucuuguacugcaaggcacgcugaggacuaguacuggcugcaucucccuuuccucuguccuccauccuucucccaggauggugaagggggaccugguacccagugauccccaccccaggauccuaaaucaugacuuaccugcuaauaaaaacucauuggaaaagugagaagaucuaaaaaaaaaaaaaaaaaaaaaaaaaaaaaaaaaaaaaaaaaaaaaaaaaaaaaaaaaaaaaaaaugcaucccccccccccccccccccccccccccccccaaaggcucuuuucagagccaccagaauu

SEQ ID NO: 19712 - RNA, 1904 nt, Artificial Sequence
  mRNA product Design f-3 comprising derived and/or modified sequence from HRSV(Memphis-37)__AIY60640.1__F-del_DSCav1_mut8 (opt4)
gggagagucccgcagucggcguccagcggcucugcuuguucgugugugugucguugcaggccuuauucaagcuuaccauggagcugcccauccugaagaccaacgccaucaccaccauccuggccgccgugacccugugcuucgccagcagccagaacaucaccgaggaguucuaccagagcaccugcagcgccgugagcaagggcuaccugggcgcccugagaaccggcugguacaccagcgugaucaccaucgagcugagcaacaucaaggagaucaagugcaacggcaccgacgccaaggugaagcugaucaagcaggagcuggacaaguacaagaacgccgugaccgaccugcagcugcugaugcagagcacccccgccgccggcagcggcagcgccaucgccagcggcaucgccgugugcaaggugcugcaccuggagggcgaggugaacaagaucaagaacgcccugcugagcaccaacaaggccguggugagccugagcggcugcggcgugagcgugcugaccuucaaggugcuggaccugaagaacuacaucgacaagcagcugcugcccauccugaacaagcagagcugcagcauccccaacaucgagaccgugaucgaguuccagcagaagaacaacagacugcuggagaucaccagagaguucagcgugaacgccggcgugaccacccccgugagcaccuacaugcugaccaacagcgagcugcugagccugaucaacgacaugcccaucaccaacgaccagaagaagcugaugagcaacaacgugcagaucgugagacagcagagcuacagcaucaugugcaucaucaaggaggaggugcuggccuacguggugcagcugccccuguacggcgugaucgacacccccugcuggaagcugcacaccagcccccugugcaccaccaacaccaaggagggcagcaacaucugccugaccagaaccgacagaggcugguacugcgacaacgccggcagcgugagcuucuucccccaggccgagaccugcaaggugcagagcaacagaguguucugcgacaccaugaacagccugacccugcccagcgaggugaaccugugcaacaucgacaucuucaaccccaaguacgacugcaagaucaugaccagcaagaccgacgugagcagcagcgugaucaccagccugggcgccaucgugagcugcuacggcaagaccaagugcaccgccagcaacaagugcagaggcaucaucaagaccuucagcaacggcugcgacuacgugagcaacaagggcguggacaccgugagcgugggcaacacccuguacuacgugaacaagcaggagggccagagccuguacgugaagggcgagcccaucaucaacuucuacgacccccugguguuccccagcgacgaguucgacgccagcaucagccaggugaacgagaagaucaaccagagccuggccuucaucagaaagagcgacgagcugcugcacaacgugaacgugggcaagagcaccaccaacaucaugaucaccaccaucaucaucgugaucaucgugauccugcugcugcugaucgccgugggccuguuccuguacugcaaggccagaugaggacuaguacuggcugcaucucccuuuccucuguccuccauccuucucccaggauggugaagggggaccugguacccagugauccccaccccaggauccuaaaucaugacuuaccugcuaauaaaaacucauuggaaaagugagaagaucuaaaaaaaaaaaaaaaaaaaaaaaaaaaaaaaaaaaaaaaaaaaaaaaaaaaaaaaaaaaaaaaaugcaucccccccccccccccccccccccccccccccaaaggcucuuuucagagccaccagaauu

SEQ ID NO: 19713 - RNA, 1904 nt, Artificial Sequence
  mRNA product Design f-3 comprising derived and/or modified sequence from HRSV(Memphis-37)__AIY60640.1__F-del_DSCav1_mut8 (opt5)
gggagagucccgcagucggcguccagcggcucugcuuguucgugugugugucguugcaggccuuauucaagcuuaccauggagcugcccauccucaagaccaacgccauuacaacgauccuggcugccgugacccuuugcuucgcgagcucccagaauauuacagaagaguuuuaccaaucuaccuguagcgcugucuccaaaggcuaucugggggcccucagaacaggaugguacaccucuguuaucacaauugaacugagcaacaucaaggagaucaaaugcaauggcaccgacgccaaggugaaacuuauuaagcaggaacuggauaaguauaaaaacgcugugacggaccuccagcugcugaugcaguccaccccugccgcugggucuggaagcgccaucgcguccggcauugccgucuguaaggugcuccaccuggagggggagguuaauaaaaucaagaacgcccuucugagcacaaauaaagcuguggucucucucuccggaugcggcgugagcguucugaccuucaaggugcuugaucugaagaacuacauugacaaacaacuccugccgauccugaauaagcagucuuguuccauucccaacaucgaaacagucaucgaguuucagcagaaaaauaaccggcuccuggaaauuacccgcgaguucagcgugaaugcuggcgugacgacaccugucucuaccuauaugcuuacaaacuccgagcugcucagccugaucaaugauaugcccauuaccaacgaccaaaagaaacuuauguccaacaauguucagaucgugagacagcagucuuacagcauuaugugcaucaucaaggaagaggugcuggccuaugucgugcaacucccucuguacgggguuauugauacccccuguuggaaacugcauacauccccucucugcacgaccaacacaaaggaaggaagcaauaucugucugacccggacagaccgcggcugguacugcgauaacgcggggucuguguccuuuuucccgcaggccgagaccuguaagguccagagcaauagaguguuuugcgacacgaugaacucucuuacacugcccagcgaaguuaaucucugcaacauugauaucuucaauccuaaauaugacuguaagauuaugaccuccaaaaccgaugugucuagcuccgucaucacaagccugggagcuaucgugucuugcuacggcaagaccaaauguacagccuccaacaagugccgggggauuaucaagacguuuagcaauggaugugacuaugucucuaacaaaggcguggacaccguuuccgugggcaauacacuuuacuaugucaacaagcaagaggggcagagccuguacgugaaaggagagcccauuaucaauuucuaugauccucucguuuuucccuccgacgaguucgaugcuucuauuagccaggugaacgaaaagaucaaccagucccuggccuuuauucgcaaaucugacgaacugcuccacaaugucaacgugggcaagagcaccacaaauaucaugaucaccacgauuaucauugugaucauuguuauccugcuucugcucaucgccgucgggcuguuccuguacugcaaggcuagaugaggacuaguacuggcugcaucucccuuuccucuguccuccauccuucucccaggauggugaagggggaccugguacccagugauccccaccccaggauccuaaaucaugacuuaccugcuaauaaaaacucauuggaaaagugagaagaucuaaaaaaaaaaaaaaaaaaaaaaaaaaaaaaaaaaaaaaaaaaaaaaaaaaaaaaaaaaaaaaaaugcaucccccccccccccccccccccccccccccccaaaggcucuuuucagagccaccagaauu

SEQ ID NO: 19714 - RNA, 1904 nt, Artificial Sequence
  mRNA product Design f-3 comprising derived and/or modified sequence from HRSV(Memphis-37)__AIY60640.1__F-del_DSCav1_mut8 (opt6)
gggagagucccgcagucggcguccagcggcucugcuuguucgugugugugucguugcaggccuuauucaagcuuaccauggaacuacccauacuaaaaacaaacgcaauuacaacaauacuugccgcaguaaccuuaugcuuugccucaucccaaaacauaacagaagaauuuuaucaaucaacaugcuccgcaguaucaaaaggauaccuaggcgcucuaagaacaggaugguacacauccguaaucacaauagaacuauccaauauaaaagaaauaaaauguaauggaacagaugcaaaaguuaaauuaauaaaacaagaacuagacaaauacaaaaacgcaguuaccgaucuccaacuauuaaugcaaucaacaccagcugcaggaaguggaagcgccauagcaagcggaauagcagucugcaaaguauuacaucuugaaggcgaaguaaacaaaaucaaaaaugcccuccucucaacaaacaaagcuguaguaucccuaucaggaugcgguguaucuguucuuacauuuaaaguacucgaucuaaaaaacuacaucgauaaacaguuacuuccaauacucaacaaacaaucauguagcauaccaaacauagaaacaguaauagaauuucaacaaaaaaacaaucgacuacucgaaauaacuagagaauuuucuguaaacgcuggaguaaccacaccagugucuaccuauaugcuuacaaauagcgaacuccuaucacuaaucaaugacaugccaauaacaaaugaccagaaaaaacucaugucaaauaacguacaaauaguacgacaacaaagcuacuccauaaugugcauaaucaaagaagaaguauuagccuacguuguucaacuaccauuauauggaguuauagacacuccaugcuggaaauuacauacaagcccacucuguacaacaaacacaaaagaaggcucaaacauaugcuuaacaagaacagauagaggaugguacugcgauaacgcaggcucagucucauuuuuuccacaagccgaaaccugcaaaguacaaucaaauagaguuuuuugcgacacaaugaacucacucacucuaccaagugaaguaaaucucuguaauaucgacauauucaacccaaaauaugacugcaaaauaaugacaucuaaaaccgauguauccucaagcguaaucacaucauuaggagcuauaguuuccugcuacgguaaaacaaaaugcacagcauccaacaaaugucgcgguaucaucaaaacauucuccaacggaugugauuacguaucaaacaaaggugucgacaccguaagcguaggcaacacuuuauacuauguaaacaaacaagaaggacaaagucuauauguaaaaggagaaccaauaauaaacuucuaugacccccuaguauucccuuccgacgaauuugaugcaagcauuucacaaguuaacgaaaaaaucaaucaaucccuugcuuucauaagaaaaucagacgaauuacuacacaacguaaacguaggaaaaagcacaacaaauaucaugauuacaacaauaauaauuguaauaauaguaauacuccucuuacuuauagcagucggcuuauuccuuuacugcaaagcaagauaaggacuaguacuggcugcaucucccuuuccucuguccuccauccuucucccaggauggugaagggggaccugguacccagugauccccaccccaggauccuaaaucaugacuuaccugcuaauaaaaacucauuggaaaagugagaagaucuaaaaaaaaaaaaaaaaaaaaaaaaaaaaaaaaaaaaaaaaaaaaaaaaaaaaaaaaaaaaaaaaugcaucccccccccccccccccccccccccccccccaaaggcucuuuucagagccaccagaauu

SEQ ID NO: 19715 - RNA, 1904 nt, Artificial Sequence
  mRNA product Design f-3 comprising derived and/or modified sequence from HRSV(Memphis-37)__AIY60640.1__F-del_DSCav1_mut8 (opt11)
gggagagucccgcagucggcguccagcggcucugcuuguucgugugugugucguugcaggccuuauucaagcuuaccauggaacuccccauccuaaaaaccaacgcaaucaccaccauccucgccgccguaacacucugcuuugcaagcucccaaaacaucaccgaagaauuuuaccaaucuaccugcagcgccguaucuaaaggauaccuaggagcccucagaaccgguugguacaccucugucaucacaauagaacucuccaacaucaaagaaaucaaaugcaacggcaccgacgccaaagucaaacucaucaaacaagaacucgacaaauauaaaaacgccguaaccgaccuccaacuccucaugcaauccacccccgccgccggcaguggcuccgcuaucgccuccggaaucgccguuugcaaaguccugcaccuagaaggcgaagucaacaaaaucaaaaacgcccugcucucaaccaacaaagcugucguaagccucuccggcugcggagucuccguccuuaccuucaaaguacucgaccuuaaaaacuacaucgacaaacaacuucuccccauacucaauaaacaauccugcuccauacccaacaucgaaacagucaucgaguuccaacagaaaaauaaccgccuccucgaaauaacccgcgaguucuccgucaacgcaggcgucaccaccccagucuccaccuacaugcugacaaacuccgaacuccuaucccucaucaacgacaugcccaucaccaacgaccaaaagaaacucaugagcaauaacguccaaaucguacgacaacaauccuacagcaucauguguaucaucaaagaagaaguacucgccuacgucguccaacucccacuauacggcgucaucgacacaccaugcuggaaacuucacaccuccccacucugcaccacaaacacaaaagaaggcuccaacaucugccuuacccgaaccgaccgcgggugguacugcgacaacgccggaucagucucguucuuuccccaagccgaaaccugcaaaguacaaucaaaucgcgucuucugcgacaccaugaacuccuuaacacuaccauccgaaguaaaccucugcaacauagacaucuucaacccaaaauacgacugcaaaaucaugaccuccaaaaccgacguauccuccuccguaaucaccagccucggcgcaauagucucaugcuacggcaaaaccaaaugcaccgccuccaacaaaugccgcggcaucauaaaaacuuucucuaacggaugcgacuacgucagcaacaaaggcgucgacaccguauccguagguaauacacuuuacuacgucaauaaacaagaaggccaaucccucuacgucaaaggagaacccaucauaaacuucuacgacccccucgucuuccccuccgacgaguucgacgccuccaucagccaggucaacgaaaagaucaaccaaucacucgccuucauccgcaaaagcgacgaacuccuccacaacguaaacgucggcaaauccacaaccaacauaaugaucaccacuaucaucaucgugauaaucgucauuuuacuucuccucaucgccguaggccucuuccuauacugcaaagcccgcuaaggacuaguacuggcugcaucucccuuuccucuguccuccauccuucucccaggauggugaagggggaccugguacccagugauccccaccccaggauccuaaaucaugacuuaccugcuaauaaaaacucauuggaaaagugagaagaucuaaaaaaaaaaaaaaaaaaaaaaaaaaaaaaaaaaaaaaaaaaaaaaaaaaaaaaaaaaaaaaaaugcaucccccccccccccccccccccccccccccccaaaggcucuuuucagagccaccagaauu

SEQ ID NO: 19716 - RNA, 2120 nt, Artificial Sequence
  mRNA product Design f-4 comprising derived and/or modified sequence from HRSV(Memphis-37)__AIY60640.1__F-del_DSCav1_mut8 (opt1)
gggagagucccgcagucggcguccagcggcucugcuuguucgugugugugucguugcaggccuuauucaagcuuaccauggagcugcccauccucaagaccaacgccaucaccacgauccuggccgcggugacccugugcuucgccagcucccagaacaucaccgaggaguucuaccagagcacgugcuccgccgucagcaagggcuaccucggcgcccugcgcaccgggugguacaccagcgugaucaccaucgagcuguccaacaucaaggagaucaagugcaacggcaccgacgccaaggugaagcucaucaagcaggagcuggacaaguacaagaacgcggucacggaccugcagcuccugaugcagagcaccccggccgccggcuccgggagcgcgaucgccuccggcaucgccgucugcaaggugcugcaccucgagggcgaggugaacaagaucaagaacgcccugcuguccaccaacaaggccgucgugagccucuccggcugcggggugagcguccugaccuucaaggugcuggaccucaagaacuacaucgacaagcagcugcugcccauccugaacaagcagagcugcuccauccccaacaucgagaccgucaucgaguuccagcagaagaacaaccgccuccuggagaucacgcgggaguucagcgugaacgcgggcgugaccacccccgucuccaccuacaugcugacgaacagcgagcuccugucccugaucaacgacaugccgaucaccaacgaccagaagaagcucaugagcaacaacgugcagaucgugcgccagcaguccuacagcaucaugugcaucaucaaggaggagguccuggccuacguggugcagcugccccucuacggggucaucgacacccccugcuggaagcugcacaccagcccccugugcacgaccaacaccaaggagggcuccaacaucugccucacccggacggaccgcgggugguacugcgacaacgccggcagcguguccuucuucccgcaggccgagaccugcaagguccagagcaaccggguguucugcgacaccaugaacucccugacccugcccagcgaggugaaccucugcaacaucgacaucuucaaccccaaguacgacugcaagaucaugacguccaagaccgacgucagcuccagcgugaucaccucccugggcgccaucgugagcugcuacgggaagaccaagugcacggcgagcaacaagugccgcggcaucaucaagaccuucuccaacgggugcgacuacgucagcaacaagggcguggacaccguguccgucggcaacacccuguacuacgugaacaagcaggagggccagagccucuacgugaagggggagcccaucaucaacuucuacgacccgcuggucuuccccuccgacgaguucgacgccagcaucucccaggugaacgagaagaucaaccagagccuggccuucauccggaaguccgacgagcuccugcacaacgugaacgucggcaagagcaccacgaacaucaugaucaccaccaucaucaucgugaucaucgugauccugcugcuccugaucgccgucgggcuguuccucuacugcaaggcccgcugaggacuagugaagggaacacccaaauuuaauucagccuuaagcacaauuaauuaagagugaaacguaauuguacaagcaguuggucacccaccauagggcaugaucaacaccgcaaccuuuccuuuuucccccagugauucugaaaaaccccucuucccuucagcuugcuuagauguuccaaauuuaguaagcuuaaggcggccuacagaagaaaaagaaaaaaaaggccacaaaaguucccucucacuuucaguaaauaaaauaaaagcagcaacagaaauaaagaaauaaaugaaauucaaaaugaaauaaauauuguguugugcagcauuaaaaaaucaauaaaaauuaaaaaugagcaagaucuaaaaaaaaaaaaaaaaaaaaaaaaaaaaaaaaaaaaaaaaaaaaaaaaaaaaaaaaaaaaaaaaugcaucccccccccccccccccccccccccccccccaaaggcucuuuucagagccaccagaauu

SEQ ID NO: 19717 - RNA, 2120 nt, Artificial Sequence
  mRNA product Design f-4 comprising derived and/or modified sequence from HRSV(Memphis-37)__AIY60640.1__F-del_DSCav1_mut8 (opt1)
gggagagucccgcagucggcguccagcggcucugcuuguucgugugugugucguugcaggccuuauucaagcuuaccauggagcugcccauccucaagaccaacgccaucaccacgauccuggccgcggugacccugugcuucgccagcucccagaacaucaccgaggaguucuaccagagcacgugcuccgccgucagcaagggcuaccucggggcccugcgcaccggcugguacaccuccgugaucaccaucgagcugagcaacaucaaggagaucaagugcaacgggaccgacgccaaggugaagcucaucaagcaggagcuggacaaguacaagaacgcggucacggaccugcagcuccugaugcaguccaccccggccgccggcagcggguccgccaucgcgagcggcaucgccgugugcaaggugcugcaccucgagggcgaggucaacaagaucaagaacgcccugcuguccaccaacaaggccguggugagccucuccgggugcggcgucagcgugcugaccuucaaggugcuggaccucaagaacuacaucgacaagcagcugcugcccauccucaacaagcaguccugcagcauccccaacaucgagacggucaucgaguuccagcagaagaacaaccggcugcuggagaucacccgcgaguucuccgugaacgccggggugaccacccccgucagcacguacaugcucaccaacuccgagcugcugagccucaucaacgacaugccgaucaccaacgaccagaagaagcugaugagcaacaacgugcagaucgugcggcagcaguccuacagcaucaugugcaucaucaaggaggagguccuggcguacguggugcagcucccccuguacggcgucaucgacacccccugcuggaagcugcacacgagcccccucugcaccaccaacaccaaggagggguccaacaucugccugacgcgcaccgaccggggcugguacugcgacaacgccggcuccgugagcuucuucccgcaggccgagaccugcaaggugcaguccaaccgcgucuucugcgacaccaugaacagccugacgcuccccuccgaggugaaccugugcaacaucgacaucuucaaccccaaguacgacugcaagaucaugaccagcaagaccgacgucuccagcuccgugaucaccagccugggggccaucguguccugcuacggcaagacgaagugcaccgccagcaacaagugccgggggaucaucaagaccuucuccaacggcugcgacuacgucagcaacaagggcguggacaccguguccgucgggaacacgcucuacuacgugaacaagcaggagggccagagccuguacgugaagggggagcccaucaucaacuucuacgacccgcuggucuuccccagcgacgaguucgacgcguccaucagccaggugaacgagaagaucaaccagucccucgccuucauccgcaagagcgacgagcugcugcacaacgugaacgucggcaaguccaccaccaacaucaugaucaccaccaucaucaucgugaucaucgugauccuccugcugcucaucgccgucgggcuguuccuguacugcaaggcccggugaggacuagugaagggaacacccaaauuuaauucagccuuaagcacaauuaauuaagagugaaacguaauuguacaagcaguuggucacccaccauagggcaugaucaacaccgcaaccuuuccuuuuucccccagugauucugaaaaaccccucuucccuucagcuugcuuagauguuccaaauuuaguaagcuuaaggcggccuacagaagaaaaagaaaaaaaaggccacaaaaguucccucucacuuucaguaaauaaaauaaaagcagcaacagaaauaaagaaauaaaugaaauucaaaaugaaauaaauauuguguugugcagcauuaaaaaaucaauaaaaauuaaaaaugagcaagaucuaaaaaaaaaaaaaaaaaaaaaaaaaaaaaaaaaaaaaaaaaaaaaaaaaaaaaaaaaaaaaaaaugcaucccccccccccccccccccccccccccccccaaaggcucuuuucagagccaccagaauu

SEQ ID NO: 19718 - RNA, 2120 nt, Artificial Sequence
  mRNA product Design f-4 comprising derived and/or modified sequence from HRSV(Memphis-37)__AIY60640.1__F-del_DSCav1_mut8 (opt2)
gggagagucccgcagucggcguccagcggcucugcuuguucgugugugugucguugcaggccuuauucaagcuuaccauggagcuccccauccucaagaccaacgccaucaccaccauccucgccgccgucacccucugcuucgccuccucccagaacaucaccgaggaguucuaccaguccaccugcuccgccgucuccaagggcuaccucggcgcccuccgcaccggcugguacaccuccgucaucaccaucgagcucuccaacaucaaggagaucaagugcaacggcaccgacgccaaggucaagcucaucaagcaggagcucgacaaguacaagaacgccgucaccgaccuccagcuccucaugcaguccacccccgccgccggcuccggcuccgccaucgccuccggcaucgccgucugcaagguccuccaccucgagggcgaggucaacaagaucaagaacgcccuccucuccaccaacaaggccgucgucucccucuccggcugcggcgucuccguccucaccuucaagguccucgaccucaagaacuacaucgacaagcagcuccuccccauccucaacaagcaguccugcuccauccccaacaucgagaccgucaucgaguuccagcagaagaacaaccgccuccucgagaucacccgcgaguucuccgucaacgccggcgucaccacccccgucuccaccuacaugcucaccaacuccgagcuccucucccucaucaacgacaugcccaucaccaacgaccagaagaagcucauguccaacaacguccagaucguccgccagcaguccuacuccaucaugugcaucaucaaggaggagguccucgccuacgucguccagcucccccucuacggcgucaucgacacccccugcuggaagcuccacaccuccccccucugcaccaccaacaccaaggagggcuccaacaucugccucacccgcaccgaccgcggcugguacugcgacaacgccggcuccgucuccuucuucccccaggccgagaccugcaagguccaguccaaccgcgucuucugcgacaccaugaacucccucacccuccccuccgaggucaaccucugcaacaucgacaucuucaaccccaaguacgacugcaagaucaugaccuccaagaccgacgucuccuccuccgucaucaccucccucggcgccaucgucuccugcuacggcaagaccaagugcaccgccuccaacaagugccgcggcaucaucaagaccuucuccaacggcugcgacuacgucuccaacaagggcgucgacaccgucuccgucggcaacacccucuacuacgucaacaagcaggagggccagucccucuacgucaagggcgagcccaucaucaacuucuacgacccccucgucuuccccuccgacgaguucgacgccuccaucucccaggucaacgagaagaucaaccagucccucgccuucauccgcaaguccgacgagcuccuccacaacgucaacgucggcaaguccaccaccaacaucaugaucaccaccaucaucaucgucaucaucgucauccuccuccuccucaucgccgucggccucuuccucuacugcaaggcccgcugaggacuagugaagggaacacccaaauuuaauucagccuuaagcacaauuaauuaagagugaaacguaauuguacaagcaguuggucacccaccauagggcaugaucaacaccgcaaccuuuccuuuuucccccagugauucugaaaaaccccucuucccuucagcuugcuuagauguuccaaauuuaguaagcuuaaggcggccuacagaagaaaaagaaaaaaaaggccacaaaaguucccucucacuuucaguaaauaaaauaaaagcagcaacagaaauaaagaaauaaaugaaauucaaaaugaaauaaauauuguguugugcagcauuaaaaaaucaauaaaaauuaaaaaugagcaagaucuaaaaaaaaaaaaaaaaaaaaaaaaaaaaaaaaaaaaaaaaaaaaaaaaaaaaaaaaaaaaaaaaugcaucccccccccccccccccccccccccccccccaaaggcucuuuucagagccaccagaauu

SEQ ID NO: 19719 - RNA, 2120 nt, Artificial Sequence
  mRNA product Design f-4 comprising derived and/or modified sequence from HRSV(Memphis-37)__AIY60640.1__F-del_DSCav1_mut8 (opt3)
gggagagucccgcagucggcguccagcggcucugcuuguucgugugugugucguugcaggccuuauucaagcuuaccauggagcugcccauccucaagaccaacgccauuacaacuauacuugcugcagugacgcugugcuucgccagcucccagaauaucaccgaagaguuuuaccaaucuacauguucagcggucaguaaaggcuauuugggggcuuuaagaacuggaugguacaccagcguuauuacaaucgaacuguccaacauuaaggagaucaaaugcaaugguaccgacgccaaggugaaacuaauaaagcaggaacucgauaaguauaaaaacgcaguaacugaccugcagcuucugaugcagucuacuccugccgcuggcucggggucagcaaucgccagcggaauugcuguguguaaggucuugcaccucgagggcgaggugaauaaaaucaagaacgcccugcugaguaccaauaaagcgguugugucccucucugguugcggggucagcguguuaacguucaagguacuggaucuuaagaacuacauugacaaacaauugcugccaauccuaaauaagcaguccuguucaauaccgaacauugaaacuguuaucgaguuucagcagaaaaauaacaggcuccuggaaauuacccgggaguucagugugaaugcaggagucacaacucccgugagcaccuauaugcuuacaaacucugagcuguugucccucaucaaugauaugccuaucaccaacgaccaaaagaaacugaugucaaacaaugugcagauuguccgccagcagagcuacaguauaaugugcaucauuaaggaagagguuuuagccuaugugguacaacugccacucuacggcgugaucgauacgcccuguuggaaacuucauacuucuccucugugcacaaccaacacuaaggaaggcuccaauauauguuugacacgaaccgaccgugggugguacugcgauaacgcuggaagcgucucguuuuucccacaggccgagacguguaaggugcagucuaauagaguuuucugcgacaccaugaacucccuaacacugcccucagaagugaaucucugcaacauugauaucuucaauccuaaauaugacuguaagaucaugacaaguaaaaccgaugucagcuccucugugauuacaagccugggugcaaucguaucaugcuacggcaagacuaaauguaccgcuaguaacaagugcagggggauuauaaagacauuuuccaauggaugugacuauguuagcaacaaaggcguggacaccgucucuguggguaauacucuuuacuaugucaacaagcaagaggggcagucacuguacgugaaaggagagccaaucauuaauuucuaugauccguugguuuuucccagugacgaauuugaugccagcaucucccaggugaacgagaagaucaaccagucucucgcguuuauucggaaaucggacgaacuguuacacaauguaaacgucggcaagagcacgacaaauauaaugaucaccacuauuaucauugugaucauaguuauccugcuacuccugauugccgugggccuuuucuuguacugcaaggcacgcugaggacuagugaagggaacacccaaauuuaauucagccuuaagcacaauuaauuaagagugaaacguaauuguacaagcaguuggucacccaccauagggcaugaucaacaccgcaaccuuuccuuuuucccccagugauucugaaaaaccccucuucccuucagcuugcuuagauguuccaaauuuaguaagcuuaaggcggccuacagaagaaaaagaaaaaaaaggccacaaaaguucccucucacuuucaguaaauaaaauaaaagcagcaacagaaauaaagaaauaaaugaaauucaaaaugaaauaaauauuguguugugcagcauuaaaaaaucaauaaaaauuaaaaaugagcaagaucuaaaaaaaaaaaaaaaaaaaaaaaaaaaaaaaaaaaaaaaaaaaaaaaaaaaaaaaaaaaaaaaaugcaucccccccccccccccccccccccccccccccaaaggcucuuuucagagccaccagaauu

SEQ ID NO: 19720 - RNA, 2120 nt, Artificial Sequence
  mRNA product Design f-4 comprising derived and/or modified sequence from HRSV(Memphis-37)__AIY60640.1__F-del_DSCav1_mut8 (opt4)
gggagagucccgcagucggcguccagcggcucugcuuguucgugugugugucguugcaggccuuauucaagcuuaccauggagcugcccauccugaagaccaacgccaucaccaccauccuggccgccgugacccugugcuucgccagcagccagaacaucaccgaggaguucuaccagagcaccugcagcgccgugagcaagggcuaccugggcgcccugagaaccggcugguacaccagcgugaucaccaucgagcugagcaacaucaaggagaucaagugcaacggcaccgacgccaaggugaagcugaucaagcaggagcuggacaaguacaagaacgccgugaccgaccugcagcugcugaugcagagcacccccgccgccggcagcggcagcgccaucgccagcggcaucgccgugugcaaggugcugcaccuggagggcgaggugaacaagaucaagaacgcccugcugagcaccaacaaggccguggugagccugagcggcugcggcgugagcgugcugaccuucaaggugcuggaccugaagaacuacaucgacaagcagcugcugcccauccugaacaagcagagcugcagcauccccaacaucgagaccgugaucgaguuccagcagaagaacaacagacugcuggagaucaccagagaguucagcgugaacgccggcgugaccacccccgugagcaccuacaugcugaccaacagcgagcugcugagccugaucaacgacaugcccaucaccaacgaccagaagaagcugaugagcaacaacgugcagaucgugagacagcagagcuacagcaucaugugcaucaucaaggaggaggugcuggccuacguggugcagcugccccuguacggcgugaucgacacccccugcuggaagcugcacaccagcccccugugcaccaccaacaccaaggagggcagcaacaucugccugaccagaaccgacagaggcugguacugcgacaacgccggcagcgugagcuucuucccccaggccgagaccugcaaggugcagagcaacagaguguucugcgacaccaugaacagccugacccugcccagcgaggugaaccugugcaacaucgacaucuucaaccccaaguacgacugcaagaucaugaccagcaagaccgacgugagcagcagcgugaucaccagccugggcgccaucgugagcugcuacggcaagaccaagugcaccgccagcaacaagugcagaggcaucaucaagaccuucagcaacggcugcgacuacgugagcaacaagggcguggacaccgugagcgugggcaacacccuguacuacgugaacaagcaggagggccagagccuguacgugaagggcgagcccaucaucaacuucuacgacccccugguguuccccagcgacgaguucgacgccagcaucagccaggugaacgagaagaucaaccagagccuggccuucaucagaaagagcgacgagcugcugcacaacgugaacgugggcaagagcaccaccaacaucaugaucaccaccaucaucaucgugaucaucgugauccugcugcugcugaucgccgugggccuguuccuguacugcaaggccagaugaggacuagugaagggaacacccaaauuuaauucagccuuaagcacaauuaauuaagagugaaacguaauuguacaagcaguuggucacccaccauagggcaugaucaacaccgcaaccuuuccuuuuucccccagugauucugaaaaaccccucuucccuucagcuugcuuagauguuccaaauuuaguaagcuuaaggcggccuacagaagaaaaagaaaaaaaaggccacaaaaguucccucucacuuucaguaaauaaaauaaaagcagcaacagaaauaaagaaauaaaugaaauucaaaaugaaauaaauauuguguugugcagcauuaaaaaaucaauaaaaauuaaaaaugagcaagaucuaaaaaaaaaaaaaaaaaaaaaaaaaaaaaaaaaaaaaaaaaaaaaaaaaaaaaaaaaaaaaaaaugcaucccccccccccccccccccccccccccccccaaaggcucuuuucagagccaccagaauu

SEQ ID NO: 19721 - RNA, 2120 nt, Artificial Sequence
  mRNA product Design f-4 comprising derived and/or modified sequence from HRSV(Memphis-37)__AIY60640.1__F-del_DSCav1_mut8 (opt5)
gggagagucccgcagucggcguccagcggcucugcuuguucgugugugugucguugcaggccuuauucaagcuuaccauggagcugcccauccucaagaccaacgccauuacaacgauccuggcugccgugacccuuugcuucgcgagcucccagaauauuacagaagaguuuuaccaaucuaccuguagcgcugucuccaaaggcuaucugggggcccucagaacaggaugguacaccucuguuaucacaauugaacugagcaacaucaaggagaucaaaugcaauggcaccgacgccaaggugaaacuuauuaagcaggaacuggauaaguauaaaaacgcugugacggaccuccagcugcugaugcaguccaccccugccgcugggucuggaagcgccaucgcguccggcauugccgucuguaaggugcuccaccuggagggggagguuaauaaaaucaagaacgcccuucugagcacaaauaaagcuguggucucucucuccggaugcggcgugagcguucugaccuucaaggugcuugaucugaagaacuacauugacaaacaacuccugccgauccugaauaagcagucuuguuccauucccaacaucgaaacagucaucgaguuucagcagaaaaauaaccggcuccuggaaauuacccgcgaguucagcgugaaugcuggcgugacgacaccugucucuaccuauaugcuuacaaacuccgagcugcucagccugaucaaugauaugcccauuaccaacgaccaaaagaaacuuauguccaacaauguucagaucgugagacagcagucuuacagcauuaugugcaucaucaaggaagaggugcuggccuaugucgugcaacucccucuguacgggguuauugauacccccuguuggaaacugcauacauccccucucugcacgaccaacacaaaggaaggaagcaauaucugucugacccggacagaccgcggcugguacugcgauaacgcggggucuguguccuuuuucccgcaggccgagaccuguaagguccagagcaauagaguguuuugcgacacgaugaacucucuuacacugcccagcgaaguuaaucucugcaacauugauaucuucaauccuaaauaugacuguaagauuaugaccuccaaaaccgaugugucuagcuccgucaucacaagccugggagcuaucgugucuugcuacggcaagaccaaauguacagccuccaacaagugccgggggauuaucaagacguuuagcaauggaugugacuaugucucuaacaaaggcguggacaccguuuccgugggcaauacacuuuacuaugucaacaagcaagaggggcagagccuguacgugaaaggagagcccauuaucaauuucuaugauccucucguuuuucccuccgacgaguucgaugcuucuauuagccaggugaacgaaaagaucaaccagucccuggccuuuauucgcaaaucugacgaacugcuccacaaugucaacgugggcaagagcaccacaaauaucaugaucaccacgauuaucauugugaucauuguuauccugcuucugcucaucgccgucgggcuguuccuguacugcaaggcuagaugaggacuagugaagggaacacccaaauuuaauucagccuuaagcacaauuaauuaagagugaaacguaauuguacaagcaguuggucacccaccauagggcaugaucaacaccgcaaccuuuccuuuuucccccagugauucugaaaaaccccucuucccuucagcuugcuuagauguuccaaauuuaguaagcuuaaggcggccuacagaagaaaaagaaaaaaaaggccacaaaaguucccucucacuuucaguaaauaaaauaaaagcagcaacagaaauaaagaaauaaaugaaauucaaaaugaaauaaauauuguguugugcagcauuaaaaaaucaauaaaaauuaaaaaugagcaagaucuaaaaaaaaaaaaaaaaaaaaaaaaaaaaaaaaaaaaaaaaaaaaaaaaaaaaaaaaaaaaaaaaugcaucccccccccccccccccccccccccccccccaaaggcucuuuucagagccaccagaauu

SEQ ID NO: 19722 - RNA, 2120 nt, Artificial Sequence
  mRNA product Design f-4 comprising derived and/or modified sequence from HRSV(Memphis-37)__AIY60640.1__F-del_DSCav1_mut8 (opt6)
gggagagucccgcagucggcguccagcggcucugcuuguucgugugugugucguugcaggccuuauucaagcuuaccauggaacuacccauacuaaaaacaaacgcaauuacaacaauacuugccgcaguaaccuuaugcuuugccucaucccaaaacauaacagaagaauuuuaucaaucaacaugcuccgcaguaucaaaaggauaccuaggcgcucuaagaacaggaugguacacauccguaaucacaauagaacuauccaauauaaaagaaauaaaauguaauggaacagaugcaaaaguuaaauuaauaaaacaagaacuagacaaauacaaaaacgcaguuaccgaucuccaacuauuaaugcaaucaacaccagcugcaggaaguggaagcgccauagcaagcggaauagcagucugcaaaguauuacaucuugaaggcgaaguaaacaaaaucaaaaaugcccuccucucaacaaacaaagcuguaguaucccuaucaggaugcgguguaucuguucuuacauuuaaaguacucgaucuaaaaaacuacaucgauaaacaguuacuuccaauacucaacaaacaaucauguagcauaccaaacauagaaacaguaauagaauuucaacaaaaaaacaaucgacuacucgaaauaacuagagaauuuucuguaaacgcuggaguaaccacaccagugucuaccuauaugcuuacaaauagcgaacuccuaucacuaaucaaugacaugccaauaacaaaugaccagaaaaaacucaugucaaauaacguacaaauaguacgacaacaaagcuacuccauaaugugcauaaucaaagaagaaguauuagccuacguuguucaacuaccauuauauggaguuauagacacuccaugcuggaaauuacauacaagcccacucuguacaacaaacacaaaagaaggcucaaacauaugcuuaacaagaacagauagaggaugguacugcgauaacgcaggcucagucucauuuuuuccacaagccgaaaccugcaaaguacaaucaaauagaguuuuuugcgacacaaugaacucacucacucuaccaagugaaguaaaucucuguaauaucgacauauucaacccaaaauaugacugcaaaauaaugacaucuaaaaccgauguauccucaagcguaaucacaucauuaggagcuauaguuuccugcuacgguaaaacaaaaugcacagcauccaacaaaugucgcgguaucaucaaaacauucuccaacggaugugauuacguaucaaacaaaggugucgacaccguaagcguaggcaacacuuuauacuauguaaacaaacaagaaggacaaagucuauauguaaaaggagaaccaauaauaaacuucuaugacccccuaguauucccuuccgacgaauuugaugcaagcauuucacaaguuaacgaaaaaaucaaucaaucccuugcuuucauaagaaaaucagacgaauuacuacacaacguaaacguaggaaaaagcacaacaaauaucaugauuacaacaauaauaauuguaauaauaguaauacuccucuuacuuauagcagucggcuuauuccuuuacugcaaagcaagauaaggacuagugaagggaacacccaaauuuaauucagccuuaagcacaauuaauuaagagugaaacguaauuguacaagcaguuggucacccaccauagggcaugaucaacaccgcaaccuuuccuuuuucccccagugauucugaaaaaccccucuucccuucagcuugcuuagauguuccaaauuuaguaagcuuaaggcggccuacagaagaaaaagaaaaaaaaggccacaaaaguucccucucacuuucaguaaauaaaauaaaagcagcaacagaaauaaagaaauaaaugaaauucaaaaugaaauaaauauuguguugugcagcauuaaaaaaucaauaaaaauuaaaaaugagcaagaucuaaaaaaaaaaaaaaaaaaaaaaaaaaaaaaaaaaaaaaaaaaaaaaaaaaaaaaaaaaaaaaaaugcaucccccccccccccccccccccccccccccccaaaggcucuuuucagagccaccagaauu

SEQ ID NO: 19723 - RNA, 2120 nt, Artificial Sequence
  mRNA product Design f-4 comprising derived and/or modified sequence from HRSV(Memphis-37)__AIY60640.1__F-del_DSCav1_mut8 (opt11)
gggagagucccgcagucggcguccagcggcucugcuuguucgugugugugucguugcaggccuuauucaagcuuaccauggaacuccccauccuaaaaaccaacgcaaucaccaccauccucgccgccguaacacucugcuuugcaagcucccaaaacaucaccgaagaauuuuaccaaucuaccugcagcgccguaucuaaaggauaccuaggagcccucagaaccgguugguacaccucugucaucacaauagaacucuccaacaucaaagaaaucaaaugcaacggcaccgacgccaaagucaaacucaucaaacaagaacucgacaaauauaaaaacgccguaaccgaccuccaacuccucaugcaauccacccccgccgccggcaguggcuccgcuaucgccuccggaaucgccguuugcaaaguccugcaccuagaaggcgaagucaacaaaaucaaaaacgcccugcucucaaccaacaaagcugucguaagccucuccggcugcggagucuccguccuuaccuucaaaguacucgaccuuaaaaacuacaucgacaaacaacuucuccccauacucaauaaacaauccugcuccauacccaacaucgaaacagucaucgaguuccaacagaaaaauaaccgccuccucgaaauaacccgcgaguucuccgucaacgcaggcgucaccaccccagucuccaccuacaugcugacaaacuccgaacuccuaucccucaucaacgacaugcccaucaccaacgaccaaaagaaacucaugagcaauaacguccaaaucguacgacaacaauccuacagcaucauguguaucaucaaagaagaaguacucgccuacgucguccaacucccacuauacggcgucaucgacacaccaugcuggaaacuucacaccuccccacucugcaccacaaacacaaaagaaggcuccaacaucugccuuacccgaaccgaccgcgggugguacugcgacaacgccggaucagucucguucuuuccccaagccgaaaccugcaaaguacaaucaaaucgcgucuucugcgacaccaugaacuccuuaacacuaccauccgaaguaaaccucugcaacauagacaucuucaacccaaaauacgacugcaaaaucaugaccuccaaaaccgacguauccuccuccguaaucaccagccucggcgcaauagucucaugcuacggcaaaaccaaaugcaccgccuccaacaaaugccgcggcaucauaaaaacuuucucuaacggaugcgacuacgucagcaacaaaggcgucgacaccguauccguagguaauacacuuuacuacgucaauaaacaagaaggccaaucccucuacgucaaaggagaacccaucauaaacuucuacgacccccucgucuuccccuccgacgaguucgacgccuccaucagccaggucaacgaaaagaucaaccaaucacucgccuucauccgcaaaagcgacgaacuccuccacaacguaaacgucggcaaauccacaaccaacauaaugaucaccacuaucaucaucgugauaaucgucauuuuacuucuccucaucgccguaggccucuuccuauacugcaaagcccgcuaaggacuagugaagggaacacccaaauuuaauucagccuuaagcacaauuaauuaagagugaaacguaauuguacaagcaguuggucacccaccauagggcaugaucaacaccgcaaccuuuccuuuuucccccagugauucugaaaaaccccucuucccuucagcuugcuuagauguuccaaauuuaguaagcuuaaggcggccuacagaagaaaaagaaaaaaaaggccacaaaaguucccucucacuuucaguaaauaaaauaaaagcagcaacagaaauaaagaaauaaaugaaauucaaaaugaaauaaauauuguguugugcagcauuaaaaaaucaauaaaaauuaaaaaugagcaagaucuaaaaaaaaaaaaaaaaaaaaaaaaaaaaaaaaaaaaaaaaaaaaaaaaaaaaaaaaaaaaaaaaugcaucccccccccccccccccccccccccccccccaaaggcucuuuucagagccaccagaauu

SEQ ID NO: 19724 - RNA, 1896 nt, Artificial Sequence
  mRNA product Design f-5 comprising derived and/or modified sequence from HRSV(Memphis-37)__AIY60640.1__F-del_DSCav1_mut8 (opt1)
gggagacuuucccauucuguagcagaauuugguguugccuguggucuuggucccgcggagaagcuuaccauggagcugcccauccucaagaccaacgccaucaccacgauccuggccgcggugacccugugcuucgccagcucccagaacaucaccgaggaguucuaccagagcacgugcuccgccgucagcaagggcuaccucggcgcccugcgcaccgggugguacaccagcgugaucaccaucgagcuguccaacaucaaggagaucaagugcaacggcaccgacgccaaggugaagcucaucaagcaggagcuggacaaguacaagaacgcggucacggaccugcagcuccugaugcagagcaccccggccgccggcuccgggagcgcgaucgccuccggcaucgccgucugcaaggugcugcaccucgagggcgaggugaacaagaucaagaacgcccugcuguccaccaacaaggccgucgugagccucuccggcugcggggugagcguccugaccuucaaggugcuggaccucaagaacuacaucgacaagcagcugcugcccauccugaacaagcagagcugcuccauccccaacaucgagaccgucaucgaguuccagcagaagaacaaccgccuccuggagaucacgcgggaguucagcgugaacgcgggcgugaccacccccgucuccaccuacaugcugacgaacagcgagcuccugucccugaucaacgacaugccgaucaccaacgaccagaagaagcucaugagcaacaacgugcagaucgugcgccagcaguccuacagcaucaugugcaucaucaaggaggagguccuggccuacguggugcagcugccccucuacggggucaucgacacccccugcuggaagcugcacaccagcccccugugcacgaccaacaccaaggagggcuccaacaucugccucacccggacggaccgcgggugguacugcgacaacgccggcagcguguccuucuucccgcaggccgagaccugcaagguccagagcaaccggguguucugcgacaccaugaacucccugacccugcccagcgaggugaaccucugcaacaucgacaucuucaaccccaaguacgacugcaagaucaugacguccaagaccgacgucagcuccagcgugaucaccucccugggcgccaucgugagcugcuacgggaagaccaagugcacggcgagcaacaagugccgcggcaucaucaagaccuucuccaacgggugcgacuacgucagcaacaagggcguggacaccguguccgucggcaacacccuguacuacgugaacaagcaggagggccagagccucuacgugaagggggagcccaucaucaacuucuacgacccgcuggucuuccccuccgacgaguucgacgccagcaucucccaggugaacgagaagaucaaccagagccuggccuucauccggaaguccgacgagcuccugcacaacgugaacgucggcaagagcaccacgaacaucaugaucaccaccaucaucaucgugaucaucgugauccugcugcuccugaucgccgucgggcuguuccucuacugcaaggcccgcugaggacuaguacuggcugcaucucccuuuccucuguccuccauccuucucccaggauggugaagggggaccugguacccagugauccccaccccaggauccuaaaucaugacuuaccugcuaauaaaaacucauuggaaaagugagaagaucuaaaaaaaaaaaaaaaaaaaaaaaaaaaaaaaaaaaaaaaaaaaaaaaaaaaaaaaaaaaaaaaaugcaucccccccccccccccccccccccccccccccaaaggcucuuuucagagccaccagaauu

SEQ ID NO: 19725 - RNA, 1896 nt, Artificial Sequence
  mRNA product Design f-5 comprising derived and/or modified sequence from HRSV(Memphis-37)__AIY60640.1__F-del_DSCav1_mut8 (opt1)
gggagacuuucccauucuguagcagaauuugguguugccuguggucuuggucccgcggagaagcuuaccauggagcugcccauccucaagaccaacgccaucaccacgauccuggccgcggugacccugugcuucgccagcucccagaacaucaccgaggaguucuaccagagcacgugcuccgccgucagcaagggcuaccucggggcccugcgcaccggcugguacaccuccgugaucaccaucgagcugagcaacaucaaggagaucaagugcaacgggaccgacgccaaggugaagcucaucaagcaggagcuggacaaguacaagaacgcggucacggaccugcagcuccugaugcaguccaccccggccgccggcagcggguccgccaucgcgagcggcaucgccgugugcaaggugcugcaccucgagggcgaggucaacaagaucaagaacgcccugcuguccaccaacaaggccguggugagccucuccgggugcggcgucagcgugcugaccuucaaggugcuggaccucaagaacuacaucgacaagcagcugcugcccauccucaacaagcaguccugcagcauccccaacaucgagacggucaucgaguuccagcagaagaacaaccggcugcuggagaucacccgcgaguucuccgugaacgccggggugaccacccccgucagcacguacaugcucaccaacuccgagcugcugagccucaucaacgacaugccgaucaccaacgaccagaagaagcugaugagcaacaacgugcagaucgugcggcagcaguccuacagcaucaugugcaucaucaaggaggagguccuggcguacguggugcagcucccccuguacggcgucaucgacacccccugcuggaagcugcacacgagcccccucugcaccaccaacaccaaggagggguccaacaucugccugacgcgcaccgaccggggcugguacugcgacaacgccggcuccgugagcuucuucccgcaggccgagaccugcaaggugcaguccaaccgcgucuucugcgacaccaugaacagccugacgcuccccuccgaggugaaccugugcaacaucgacaucuucaaccccaaguacgacugcaagaucaugaccagcaagaccgacgucuccagcuccgugaucaccagccugggggccaucguguccugcuacggcaagacgaagugcaccgccagcaacaagugccgggggaucaucaagaccuucuccaacggcugcgacuacgucagcaacaagggcguggacaccguguccgucgggaacacgcucuacuacgugaacaagcaggagggccagagccuguacgugaagggggagcccaucaucaacuucuacgacccgcuggucuuccccagcgacgaguucgacgcguccaucagccaggugaacgagaagaucaaccagucccucgccuucauccgcaagagcgacgagcugcugcacaacgugaacgucggcaaguccaccaccaacaucaugaucaccaccaucaucaucgugaucaucgugauccuccugcugcucaucgccgucgggcuguuccuguacugcaaggcccggugaggacuaguacuggcugcaucucccuuuccucuguccuccauccuucucccaggauggugaagggggaccugguacccagugauccccaccccaggauccuaaaucaugacuuaccugcuaauaaaaacucauuggaaaagugagaagaucuaaaaaaaaaaaaaaaaaaaaaaaaaaaaaaaaaaaaaaaaaaaaaaaaaaaaaaaaaaaaaaaaugcaucccccccccccccccccccccccccccccccaaaggcucuuuucagagccaccagaauu

SEQ ID NO: 19726 - RNA, 1896 nt, Artificial Sequence
  mRNA product Design f-5 comprising derived and/or modified sequence from HRSV(Memphis-37)__AIY60640.1__F-del_DSCav1_mut8 (opt2)
gggagacuuucccauucuguagcagaauuugguguugccuguggucuuggucccgcggagaagcuuaccauggagcuccccauccucaagaccaacgccaucaccaccauccucgccgccgucacccucugcuucgccuccucccagaacaucaccgaggaguucuaccaguccaccugcuccgccgucuccaagggcuaccucggcgcccuccgcaccggcugguacaccuccgucaucaccaucgagcucuccaacaucaaggagaucaagugcaacggcaccgacgccaaggucaagcucaucaagcaggagcucgacaaguacaagaacgccgucaccgaccuccagcuccucaugcaguccacccccgccgccggcuccggcuccgccaucgccuccggcaucgccgucugcaagguccuccaccucgagggcgaggucaacaagaucaagaacgcccuccucuccaccaacaaggccgucgucucccucuccggcugcggcgucuccguccucaccuucaagguccucgaccucaagaacuacaucgacaagcagcuccuccccauccucaacaagcaguccugcuccauccccaacaucgagaccgucaucgaguuccagcagaagaacaaccgccuccucgagaucacccgcgaguucuccgucaacgccggcgucaccacccccgucuccaccuacaugcucaccaacuccgagcuccucucccucaucaacgacaugcccaucaccaacgaccagaagaagcucauguccaacaacguccagaucguccgccagcaguccuacuccaucaugugcaucaucaaggaggagguccucgccuacgucguccagcucccccucuacggcgucaucgacacccccugcuggaagcuccacaccuccccccucugcaccaccaacaccaaggagggcuccaacaucugccucacccgcaccgaccgcggcugguacugcgacaacgccggcuccgucuccuucuucccccaggccgagaccugcaagguccaguccaaccgcgucuucugcgacaccaugaacucccucacccuccccuccgaggucaaccucugcaacaucgacaucuucaaccccaaguacgacugcaagaucaugaccuccaagaccgacgucuccuccuccgucaucaccucccucggcgccaucgucuccugcuacggcaagaccaagugcaccgccuccaacaagugccgcggcaucaucaagaccuucuccaacggcugcgacuacgucuccaacaagggcgucgacaccgucuccgucggcaacacccucuacuacgucaacaagcaggagggccagucccucuacgucaagggcgagcccaucaucaacuucuacgacccccucgucuuccccuccgacgaguucgacgccuccaucucccaggucaacgagaagaucaaccagucccucgccuucauccgcaaguccgacgagcuccuccacaacgucaacgucggcaaguccaccaccaacaucaugaucaccaccaucaucaucgucaucaucgucauccuccuccuccucaucgccgucggccucuuccucuacugcaaggcccgcugaggacuaguacuggcugcaucucccuuuccucuguccuccauccuucucccaggauggugaagggggaccugguacccagugauccccaccccaggauccuaaaucaugacuuaccugcuaauaaaaacucauuggaaaagugagaagaucuaaaaaaaaaaaaaaaaaaaaaaaaaaaaaaaaaaaaaaaaaaaaaaaaaaaaaaaaaaaaaaaaugcaucccccccccccccccccccccccccccccccaaaggcucuuuucagagccaccagaauu

SEQ ID NO: 19727 - RNA, 1896 nt, Artificial Sequence
  mRNA product Design f-5 comprising derived and/or modified sequence from HRSV(Memphis-37)__AIY60640.1__F-del_DSCav1_mut8 (opt3)
gggagacuuucccauucuguagcagaauuugguguugccuguggucuuggucccgcggagaagcuuaccauggagcugcccauccucaagaccaacgccauuacaacuauacuugcugcagugacgcugugcuucgccagcucccagaauaucaccgaagaguuuuaccaaucuacauguucagcggucaguaaaggcuauuugggggcuuuaagaacuggaugguacaccagcguuauuacaaucgaacuguccaacauuaaggagaucaaaugcaaugguaccgacgccaaggugaaacuaauaaagcaggaacucgauaaguauaaaaacgcaguaacugaccugcagcuucugaugcagucuacuccugccgcuggcucggggucagcaaucgccagcggaauugcuguguguaaggucuugcaccucgagggcgaggugaauaaaaucaagaacgcccugcugaguaccaauaaagcgguugugucccucucugguugcggggucagcguguuaacguucaagguacuggaucuuaagaacuacauugacaaacaauugcugccaauccuaaauaagcaguccuguucaauaccgaacauugaaacuguuaucgaguuucagcagaaaaauaacaggcuccuggaaauuacccgggaguucagugugaaugcaggagucacaacucccgugagcaccuauaugcuuacaaacucugagcuguugucccucaucaaugauaugccuaucaccaacgaccaaaagaaacugaugucaaacaaugugcagauuguccgccagcagagcuacaguauaaugugcaucauuaaggaagagguuuuagccuaugugguacaacugccacucuacggcgugaucgauacgcccuguuggaaacuucauacuucuccucugugcacaaccaacacuaaggaaggcuccaauauauguuugacacgaaccgaccgugggugguacugcgauaacgcuggaagcgucucguuuuucccacaggccgagacguguaaggugcagucuaauagaguuuucugcgacaccaugaacucccuaacacugcccucagaagugaaucucugcaacauugauaucuucaauccuaaauaugacuguaagaucaugacaaguaaaaccgaugucagcuccucugugauuacaagccugggugcaaucguaucaugcuacggcaagacuaaauguaccgcuaguaacaagugcagggggauuauaaagacauuuuccaauggaugugacuauguuagcaacaaaggcguggacaccgucucuguggguaauacucuuuacuaugucaacaagcaagaggggcagucacuguacgugaaaggagagccaaucauuaauuucuaugauccguugguuuuucccagugacgaauuugaugccagcaucucccaggugaacgagaagaucaaccagucucucgcguuuauucggaaaucggacgaacuguuacacaauguaaacgucggcaagagcacgacaaauauaaugaucaccacuauuaucauugugaucauaguuauccugcuacuccugauugccgugggccuuuucuuguacugcaaggcacgcugaggacuaguacuggcugcaucucccuuuccucuguccuccauccuucucccaggauggugaagggggaccugguacccagugauccccaccccaggauccuaaaucaugacuuaccugcuaauaaaaacucauuggaaaagugagaagaucuaaaaaaaaaaaaaaaaaaaaaaaaaaaaaaaaaaaaaaaaaaaaaaaaaaaaaaaaaaaaaaaaugcaucccccccccccccccccccccccccccccccaaaggcucuuuucagagccaccagaauu

SEQ ID NO: 19728 - RNA, 1896 nt, Artificial Sequence
  mRNA product Design f-5 comprising derived and/or modified sequence from HRSV(Memphis-37)__AIY60640.1__F-del_DSCav1_mut8 (opt4)
gggagacuuucccauucuguagcagaauuugguguugccuguggucuuggucccgcggagaagcuuaccauggagcugcccauccugaagaccaacgccaucaccaccauccuggccgccgugacccugugcuucgccagcagccagaacaucaccgaggaguucuaccagagcaccugcagcgccgugagcaagggcuaccugggcgcccugagaaccggcugguacaccagcgugaucaccaucgagcugagcaacaucaaggagaucaagugcaacggcaccgacgccaaggugaagcugaucaagcaggagcuggacaaguacaagaacgccgugaccgaccugcagcugcugaugcagagcacccccgccgccggcagcggcagcgccaucgccagcggcaucgccgugugcaaggugcugcaccuggagggcgaggugaacaagaucaagaacgcccugcugagcaccaacaaggccguggugagccugagcggcugcggcgugagcgugcugaccuucaaggugcuggaccugaagaacuacaucgacaagcagcugcugcccauccugaacaagcagagcugcagcauccccaacaucgagaccgugaucgaguuccagcagaagaacaacagacugcuggagaucaccagagaguucagcgugaacgccggcgugaccacccccgugagcaccuacaugcugaccaacagcgagcugcugagccugaucaacgacaugcccaucaccaacgaccagaagaagcugaugagcaacaacgugcagaucgugagacagcagagcuacagcaucaugugcaucaucaaggaggaggugcuggccuacguggugcagcugccccuguacggcgugaucgacacccccugcuggaagcugcacaccagcccccugugcaccaccaacaccaaggagggcagcaacaucugccugaccagaaccgacagaggcugguacugcgacaacgccggcagcgugagcuucuucccccaggccgagaccugcaaggugcagagcaacagaguguucugcgacaccaugaacagccugacccugcccagcgaggugaaccugugcaacaucgacaucuucaaccccaaguacgacugcaagaucaugaccagcaagaccgacgugagcagcagcgugaucaccagccugggcgccaucgugagcugcuacggcaagaccaagugcaccgccagcaacaagugcagaggcaucaucaagaccuucagcaacggcugcgacuacgugagcaacaagggcguggacaccgugagcgugggcaacacccuguacuacgugaacaagcaggagggccagagccuguacgugaagggcgagcccaucaucaacuucuacgacccccugguguuccccagcgacgaguucgacgccagcaucagccaggugaacgagaagaucaaccagagccuggccuucaucagaaagagcgacgagcugcugcacaacgugaacgugggcaagagcaccaccaacaucaugaucaccaccaucaucaucgugaucaucgugauccugcugcugcugaucgccgugggccuguuccuguacugcaaggccagaugaggacuaguacuggcugcaucucccuuuccucuguccuccauccuucucccaggauggugaagggggaccugguacccagugauccccaccccaggauccuaaaucaugacuuaccugcuaauaaaaacucauuggaaaagugagaagaucuaaaaaaaaaaaaaaaaaaaaaaaaaaaaaaaaaaaaaaaaaaaaaaaaaaaaaaaaaaaaaaaaugcaucccccccccccccccccccccccccccccccaaaggcucuuuucagagccaccagaauu

SEQ ID NO: 19729 - RNA, 1896 nt, Artificial Sequence
  mRNA product Design f-5 comprising derived and/or modified sequence from HRSV(Memphis-37)__AIY60640.1__F-del_DSCav1_mut8 (opt5)
gggagacuuucccauucuguagcagaauuugguguugccuguggucuuggucccgcggagaagcuuaccauggagcugcccauccucaagaccaacgccauuacaacgauccuggcugccgugacccuuugcuucgcgagcucccagaauauuacagaagaguuuuaccaaucuaccuguagcgcugucuccaaaggcuaucugggggcccucagaacaggaugguacaccucuguuaucacaauugaacugagcaacaucaaggagaucaaaugcaauggcaccgacgccaaggugaaacuuauuaagcaggaacuggauaaguauaaaaacgcugugacggaccuccagcugcugaugcaguccaccccugccgcugggucuggaagcgccaucgcguccggcauugccgucuguaaggugcuccaccuggagggggagguuaauaaaaucaagaacgcccuucugagcacaaauaaagcuguggucucucucuccggaugcggcgugagcguucugaccuucaaggugcuugaucugaagaacuacauugacaaacaacuccugccgauccugaauaagcagucuuguuccauucccaacaucgaaacagucaucgaguuucagcagaaaaauaaccggcuccuggaaauuacccgcgaguucagcgugaaugcuggcgugacgacaccugucucuaccuauaugcuuacaaacuccgagcugcucagccugaucaaugauaugcccauuaccaacgaccaaaagaaacuuauguccaacaauguucagaucgugagacagcagucuuacagcauuaugugcaucaucaaggaagaggugcuggccuaugucgugcaacucccucuguacgggguuauugauacccccuguuggaaacugcauacauccccucucugcacgaccaacacaaaggaaggaagcaauaucugucugacccggacagaccgcggcugguacugcgauaacgcggggucuguguccuuuuucccgcaggccgagaccuguaagguccagagcaauagaguguuuugcgacacgaugaacucucuuacacugcccagcgaaguuaaucucugcaacauugauaucuucaauccuaaauaugacuguaagauuaugaccuccaaaaccgaugugucuagcuccgucaucacaagccugggagcuaucgugucuugcuacggcaagaccaaauguacagccuccaacaagugccgggggauuaucaagacguuuagcaauggaugugacuaugucucuaacaaaggcguggacaccguuuccgugggcaauacacuuuacuaugucaacaagcaagaggggcagagccuguacgugaaaggagagcccauuaucaauuucuaugauccucucguuuuucccuccgacgaguucgaugcuucuauuagccaggugaacgaaaagaucaaccagucccuggccuuuauucgcaaaucugacgaacugcuccacaaugucaacgugggcaagagcaccacaaauaucaugaucaccacgauuaucauugugaucauuguuauccugcuucugcucaucgccgucgggcuguuccuguacugcaaggcuagaugaggacuaguacuggcugcaucucccuuuccucuguccuccauccuucucccaggauggugaagggggaccugguacccagugauccccaccccaggauccuaaaucaugacuuaccugcuaauaaaaacucauuggaaaagugagaagaucuaaaaaaaaaaaaaaaaaaaaaaaaaaaaaaaaaaaaaaaaaaaaaaaaaaaaaaaaaaaaaaaaugcaucccccccccccccccccccccccccccccccaaaggcucuuuucagagccaccagaauu

SEQ ID NO: 19730 - RNA, 1896 nt, Artificial Sequence
  mRNA product Design f-5 comprising derived and/or modified sequence from HRSV(Memphis-37)__AIY60640.1__F-del_DSCav1_mut8 (opt6)
gggagacuuucccauucuguagcagaauuugguguugccuguggucuuggucccgcggagaagcuuaccauggaacuacccauacuaaaaacaaacgcaauuacaacaauacuugccgcaguaaccuuaugcuuugccucaucccaaaacauaacagaagaauuuuaucaaucaacaugcuccgcaguaucaaaaggauaccuaggcgcucuaagaacaggaugguacacauccguaaucacaauagaacuauccaauauaaaagaaauaaaauguaauggaacagaugcaaaaguuaaauuaauaaaacaagaacuagacaaauacaaaaacgcaguuaccgaucuccaacuauuaaugcaaucaacaccagcugcaggaaguggaagcgccauagcaagcggaauagcagucugcaaaguauuacaucuugaaggcgaaguaaacaaaaucaaaaaugcccuccucucaacaaacaaagcuguaguaucccuaucaggaugcgguguaucuguucuuacauuuaaaguacucgaucuaaaaaacuacaucgauaaacaguuacuuccaauacucaacaaacaaucauguagcauaccaaacauagaaacaguaauagaauuucaacaaaaaaacaaucgacuacucgaaauaacuagagaauuuucuguaaacgcuggaguaaccacaccagugucuaccuauaugcuuacaaauagcgaacuccuaucacuaaucaaugacaugccaauaacaaaugaccagaaaaaacucaugucaaauaacguacaaauaguacgacaacaaagcuacuccauaaugugcauaaucaaagaagaaguauuagccuacguuguucaacuaccauuauauggaguuauagacacuccaugcuggaaauuacauacaagcccacucuguacaacaaacacaaaagaaggcucaaacauaugcuuaacaagaacagauagaggaugguacugcgauaacgcaggcucagucucauuuuuuccacaagccgaaaccugcaaaguacaaucaaauagaguuuuuugcgacacaaugaacucacucacucuaccaagugaaguaaaucucuguaauaucgacauauucaacccaaaauaugacugcaaaauaaugacaucuaaaaccgauguauccucaagcguaaucacaucauuaggagcuauaguuuccugcuacgguaaaacaaaaugcacagcauccaacaaaugucgcgguaucaucaaaacauucuccaacggaugugauuacguaucaaacaaaggugucgacaccguaagcguaggcaacacuuuauacuauguaaacaaacaagaaggacaaagucuauauguaaaaggagaaccaauaauaaacuucuaugacccccuaguauucccuuccgacgaauuugaugcaagcauuucacaaguuaacgaaaaaaucaaucaaucccuugcuuucauaagaaaaucagacgaauuacuacacaacguaaacguaggaaaaagcacaacaaauaucaugauuacaacaauaauaauuguaauaauaguaauacuccucuuacuuauagcagucggcuuauuccuuuacugcaaagcaagauaaggacuaguacuggcugcaucucccuuuccucuguccuccauccuucucccaggauggugaagggggaccugguacccagugauccccaccccaggauccuaaaucaugacuuaccugcuaauaaaaacucauuggaaaagugagaagaucuaaaaaaaaaaaaaaaaaaaaaaaaaaaaaaaaaaaaaaaaaaaaaaaaaaaaaaaaaaaaaaaaugcaucccccccccccccccccccccccccccccccaaaggcucuuuucagagccaccagaauu

SEQ ID NO: 19731 - RNA, 1896 nt, Artificial Sequence
  mRNA product Design f-5 comprising derived and/or modified sequence from HRSV(Memphis-37)__AIY60640.1__F-del_DSCav1_mut8 (opt11)
gggagacuuucccauucuguagcagaauuugguguugccuguggucuuggucccgcggagaagcuuaccauggaacuccccauccuaaaaaccaacgcaaucaccaccauccucgccgccguaacacucugcuuugcaagcucccaaaacaucaccgaagaauuuuaccaaucuaccugcagcgccguaucuaaaggauaccuaggagcccucagaaccgguugguacaccucugucaucacaauagaacucuccaacaucaaagaaaucaaaugcaacggcaccgacgccaaagucaaacucaucaaacaagaacucgacaaauauaaaaacgccguaaccgaccuccaacuccucaugcaauccacccccgccgccggcaguggcuccgcuaucgccuccggaaucgccguuugcaaaguccugcaccuagaaggcgaagucaacaaaaucaaaaacgcccugcucucaaccaacaaagcugucguaagccucuccggcugcggagucuccguccuuaccuucaaaguacucgaccuuaaaaacuacaucgacaaacaacuucuccccauacucaauaaacaauccugcuccauacccaacaucgaaacagucaucgaguuccaacagaaaaauaaccgccuccucgaaauaacccgcgaguucuccgucaacgcaggcgucaccaccccagucuccaccuacaugcugacaaacuccgaacuccuaucccucaucaacgacaugcccaucaccaacgaccaaaagaaacucaugagcaauaacguccaaaucguacgacaacaauccuacagcaucauguguaucaucaaagaagaaguacucgccuacgucguccaacucccacuauacggcgucaucgacacaccaugcuggaaacuucacaccuccccacucugcaccacaaacacaaaagaaggcuccaacaucugccuuacccgaaccgaccgcgggugguacugcgacaacgccggaucagucucguucuuuccccaagccgaaaccugcaaaguacaaucaaaucgcgucuucugcgacaccaugaacuccuuaacacuaccauccgaaguaaaccucugcaacauagacaucuucaacccaaaauacgacugcaaaaucaugaccuccaaaaccgacguauccuccuccguaaucaccagccucggcgcaauagucucaugcuacggcaaaaccaaaugcaccgccuccaacaaaugccgcggcaucauaaaaacuuucucuaacggaugcgacuacgucagcaacaaaggcgucgacaccguauccguagguaauacacuuuacuacgucaauaaacaagaaggccaaucccucuacgucaaaggagaacccaucauaaacuucuacgacccccucgucuuccccuccgacgaguucgacgccuccaucagccaggucaacgaaaagaucaaccaaucacucgccuucauccgcaaaagcgacgaacuccuccacaacguaaacgucggcaaauccacaaccaacauaaugaucaccacuaucaucaucgugauaaucgucauuuuacuucuccucaucgccguaggccucuuccuauacugcaaagcccgcuaaggacuaguacuggcugcaucucccuuuccucuguccuccauccuucucccaggauggugaagggggaccugguacccagugauccccaccccaggauccuaaaucaugacuuaccugcuaauaaaaacucauuggaaaagugagaagaucuaaaaaaaaaaaaaaaaaaaaaaaaaaaaaaaaaaaaaaaaaaaaaaaaaaaaaaaaaaaaaaaaugcaucccccccccccccccccccccccccccccccaaaggcucuuuucagagccaccagaauu

SEQ ID NO: 19732 - RNA, 1892 nt, Artificial Sequence
  mRNA product Design g-1 comprising derived and/or modified sequence from HRSV(Memphis-37)__AIY60640.1__F-del_DSCav1_mut8 (opt1)
gggagacuuucccauucuguagcagaauuugguguugccuguggucuuggucccgcggagaagcuuaccauggagcugcccauccucaagaccaacgccaucaccacgauccuggccgcggugacccugugcuucgccagcucccagaacaucaccgaggaguucuaccagagcacgugcuccgccgucagcaagggcuaccucggcgcccugcgcaccgggugguacaccagcgugaucaccaucgagcuguccaacaucaaggagaucaagugcaacggcaccgacgccaaggugaagcucaucaagcaggagcuggacaaguacaagaacgcggucacggaccugcagcuccugaugcagagcaccccggccgccggcuccgggagcgcgaucgccuccggcaucgccgucugcaaggugcugcaccucgagggcgaggugaacaagaucaagaacgcccugcuguccaccaacaaggccgucgugagccucuccggcugcggggugagcguccugaccuucaaggugcuggaccucaagaacuacaucgacaagcagcugcugcccauccugaacaagcagagcugcuccauccccaacaucgagaccgucaucgaguuccagcagaagaacaaccgccuccuggagaucacgcgggaguucagcgugaacgcgggcgugaccacccccgucuccaccuacaugcugacgaacagcgagcuccugucccugaucaacgacaugccgaucaccaacgaccagaagaagcucaugagcaacaacgugcagaucgugcgccagcaguccuacagcaucaugugcaucaucaaggaggagguccuggccuacguggugcagcugccccucuacggggucaucgacacccccugcuggaagcugcacaccagcccccugugcacgaccaacaccaaggagggcuccaacaucugccucacccggacggaccgcgggugguacugcgacaacgccggcagcguguccuucuucccgcaggccgagaccugcaagguccagagcaaccggguguucugcgacaccaugaacucccugacccugcccagcgaggugaaccucugcaacaucgacaucuucaaccccaaguacgacugcaagaucaugacguccaagaccgacgucagcuccagcgugaucaccucccugggcgccaucgugagcugcuacgggaagaccaagugcacggcgagcaacaagugccgcggcaucaucaagaccuucuccaacgggugcgacuacgucagcaacaagggcguggacaccguguccgucggcaacacccuguacuacgugaacaagcaggagggccagagccucuacgugaagggggagcccaucaucaacuucuacgacccgcuggucuuccccuccgacgaguucgacgccagcaucucccaggugaacgagaagaucaaccagagccuggccuucauccggaaguccgacgagcuccugcacaacgugaacgucggcaagagcaccacgaacaucaugaucaccaccaucaucaucgugaucaucgugauccugcugcuccugaucgccgucgggcuguuccucuacugcaaggcccgcugaggacuaguggaagcauuuuccuggcugauuaaaagaaauuacucagcuauggucaucuguuccuguuagaaggcuaugcagcauauuauauacuaugcgcauguuaugaaaugcauaauaaaaaauuuuaaaaaaucuaaaagaucuaaaaaaaaaaaaaaaaaaaaaaaaaaaaaaaaaaaaaaaaaaaaaaaaaaaaaaaaaaaaaaaaugcaucccccccccccccccccccccccccccccccaaaggcucuuuucagagccaccagaauu

SEQ ID NO: 19733 - RNA, 1892 nt, Artificial Sequence
  mRNA product Design g-1 comprising derived and/or modified sequence from HRSV(Memphis-37)__AIY60640.1__F-del_DSCav1_mut8 (opt1)
gggagacuuucccauucuguagcagaauuugguguugccuguggucuuggucccgcggagaagcuuaccauggagcugcccauccucaagaccaacgccaucaccacgauccuggccgcggugacccugugcuucgccagcucccagaacaucaccgaggaguucuaccagagcacgugcuccgccgucagcaagggcuaccucggggcccugcgcaccggcugguacaccuccgugaucaccaucgagcugagcaacaucaaggagaucaagugcaacgggaccgacgccaaggugaagcucaucaagcaggagcuggacaaguacaagaacgcggucacggaccugcagcuccugaugcaguccaccccggccgccggcagcggguccgccaucgcgagcggcaucgccgugugcaaggugcugcaccucgagggcgaggucaacaagaucaagaacgcccugcuguccaccaacaaggccguggugagccucuccgggugcggcgucagcgugcugaccuucaaggugcuggaccucaagaacuacaucgacaagcagcugcugcccauccucaacaagcaguccugcagcauccccaacaucgagacggucaucgaguuccagcagaagaacaaccggcugcuggagaucacccgcgaguucuccgugaacgccggggugaccacccccgucagcacguacaugcucaccaacuccgagcugcugagccucaucaacgacaugccgaucaccaacgaccagaagaagcugaugagcaacaacgugcagaucgugcggcagcaguccuacagcaucaugugcaucaucaaggaggagguccuggcguacguggugcagcucccccuguacggcgucaucgacacccccugcuggaagcugcacacgagcccccucugcaccaccaacaccaaggagggguccaacaucugccugacgcgcaccgaccggggcugguacugcgacaacgccggcuccgugagcuucuucccgcaggccgagaccugcaaggugcaguccaaccgcgucuucugcgacaccaugaacagccugacgcuccccuccgaggugaaccugugcaacaucgacaucuucaaccccaaguacgacugcaagaucaugaccagcaagaccgacgucuccagcuccgugaucaccagccugggggccaucguguccugcuacggcaagacgaagugcaccgccagcaacaagugccgggggaucaucaagaccuucuccaacggcugcgacuacgucagcaacaagggcguggacaccguguccgucgggaacacgcucuacuacgugaacaagcaggagggccagagccuguacgugaagggggagcccaucaucaacuucuacgacccgcuggucuuccccagcgacgaguucgacgcguccaucagccaggugaacgagaagaucaaccagucccucgccuucauccgcaagagcgacgagcugcugcacaacgugaacgucggcaaguccaccaccaacaucaugaucaccaccaucaucaucgugaucaucgugauccuccugcugcucaucgccgucgggcuguuccuguacugcaaggcccggugaggacuaguggaagcauuuuccuggcugauuaaaagaaauuacucagcuauggucaucuguuccuguuagaaggcuaugcagcauauuauauacuaugcgcauguuaugaaaugcauaauaaaaaauuuuaaaaaaucuaaaagaucuaaaaaaaaaaaaaaaaaaaaaaaaaaaaaaaaaaaaaaaaaaaaaaaaaaaaaaaaaaaaaaaaugcaucccccccccccccccccccccccccccccccaaaggcucuuuucagagccaccagaauu

SEQ ID NO: 19734 - RNA, 1892 nt, Artificial Sequence
  mRNA product Design g-1 comprising derived and/or modified sequence from HRSV(Memphis-37)__AIY60640.1__F-del_DSCav1_mut8 (opt2)
gggagacuuucccauucuguagcagaauuugguguugccuguggucuuggucccgcggagaagcuuaccauggagcuccccauccucaagaccaacgccaucaccaccauccucgccgccgucacccucugcuucgccuccucccagaacaucaccgaggaguucuaccaguccaccugcuccgccgucuccaagggcuaccucggcgcccuccgcaccggcugguacaccuccgucaucaccaucgagcucuccaacaucaaggagaucaagugcaacggcaccgacgccaaggucaagcucaucaagcaggagcucgacaaguacaagaacgccgucaccgaccuccagcuccucaugcaguccacccccgccgccggcuccggcuccgccaucgccuccggcaucgccgucugcaagguccuccaccucgagggcgaggucaacaagaucaagaacgcccuccucuccaccaacaaggccgucgucucccucuccggcugcggcgucuccguccucaccuucaagguccucgaccucaagaacuacaucgacaagcagcuccuccccauccucaacaagcaguccugcuccauccccaacaucgagaccgucaucgaguuccagcagaagaacaaccgccuccucgagaucacccgcgaguucuccgucaacgccggcgucaccacccccgucuccaccuacaugcucaccaacuccgagcuccucucccucaucaacgacaugcccaucaccaacgaccagaagaagcucauguccaacaacguccagaucguccgccagcaguccuacuccaucaugugcaucaucaaggaggagguccucgccuacgucguccagcucccccucuacggcgucaucgacacccccugcuggaagcuccacaccuccccccucugcaccaccaacaccaaggagggcuccaacaucugccucacccgcaccgaccgcggcugguacugcgacaacgccggcuccgucuccuucuucccccaggccgagaccugcaagguccaguccaaccgcgucuucugcgacaccaugaacucccucacccuccccuccgaggucaaccucugcaacaucgacaucuucaaccccaaguacgacugcaagaucaugaccuccaagaccgacgucuccuccuccgucaucaccucccucggcgccaucgucuccugcuacggcaagaccaagugcaccgccuccaacaagugccgcggcaucaucaagaccuucuccaacggcugcgacuacgucuccaacaagggcgucgacaccgucuccgucggcaacacccucuacuacgucaacaagcaggagggccagucccucuacgucaagggcgagcccaucaucaacuucuacgacccccucgucuuccccuccgacgaguucgacgccuccaucucccaggucaacgagaagaucaaccagucccucgccuucauccgcaaguccgacgagcuccuccacaacgucaacgucggcaaguccaccaccaacaucaugaucaccaccaucaucaucgucaucaucgucauccuccuccuccucaucgccgucggccucuuccucuacugcaaggcccgcugaggacuaguggaagcauuuuccuggcugauuaaaagaaauuacucagcuauggucaucuguuccuguuagaaggcuaugcagcauauuauauacuaugcgcauguuaugaaaugcauaauaaaaaauuuuaaaaaaucuaaaagaucuaaaaaaaaaaaaaaaaaaaaaaaaaaaaaaaaaaaaaaaaaaaaaaaaaaaaaaaaaaaaaaaaugcaucccccccccccccccccccccccccccccccaaaggcucuuuucagagccaccagaauu

SEQ ID NO: 19735 - RNA, 1892 nt, Artificial Sequence
  mRNA product Design g-1 comprising derived and/or modified sequence from HRSV(Memphis-37)__AIY60640.1__F-del_DSCav1_mut8 (opt3)
gggagacuuucccauucuguagcagaauuugguguugccuguggucuuggucccgcggagaagcuuaccauggagcugcccauccucaagaccaacgccauuacaacuauacuugcugcagugacgcugugcuucgccagcucccagaauaucaccgaagaguuuuaccaaucuacauguucagcggucaguaaaggcuauuugggggcuuuaagaacuggaugguacaccagcguuauuacaaucgaacuguccaacauuaaggagaucaaaugcaaugguaccgacgccaaggugaaacuaauaaagcaggaacucgauaaguauaaaaacgcaguaacugaccugcagcuucugaugcagucuacuccugccgcuggcucggggucagcaaucgccagcggaauugcuguguguaaggucuugcaccucgagggcgaggugaauaaaaucaagaacgcccugcugaguaccaauaaagcgguugugucccucucugguugcggggucagcguguuaacguucaagguacuggaucuuaagaacuacauugacaaacaauugcugccaauccuaaauaagcaguccuguucaauaccgaacauugaaacuguuaucgaguuucagcagaaaaauaacaggcuccuggaaauuacccgggaguucagugugaaugcaggagucacaacucccgugagcaccuauaugcuuacaaacucugagcuguugucccucaucaaugauaugccuaucaccaacgaccaaaagaaacugaugucaaacaaugugcagauuguccgccagcagagcuacaguauaaugugcaucauuaaggaagagguuuuagccuaugugguacaacugccacucuacggcgugaucgauacgcccuguuggaaacuucauacuucuccucugugcacaaccaacacuaaggaaggcuccaauauauguuugacacgaaccgaccgugggugguacugcgauaacgcuggaagcgucucguuuuucccacaggccgagacguguaaggugcagucuaauagaguuuucugcgacaccaugaacucccuaacacugcccucagaagugaaucucugcaacauugauaucuucaauccuaaauaugacuguaagaucaugacaaguaaaaccgaugucagcuccucugugauuacaagccugggugcaaucguaucaugcuacggcaagacuaaauguaccgcuaguaacaagugcagggggauuauaaagacauuuuccaauggaugugacuauguuagcaacaaaggcguggacaccgucucuguggguaauacucuuuacuaugucaacaagcaagaggggcagucacuguacgugaaaggagagccaaucauuaauuucuaugauccguugguuuuucccagugacgaauuugaugccagcaucucccaggugaacgagaagaucaaccagucucucgcguuuauucggaaaucggacgaacuguuacacaauguaaacgucggcaagagcacgacaaauauaaugaucaccacuauuaucauugugaucauaguuauccugcuacuccugauugccgugggccuuuucuuguacugcaaggcacgcugaggacuaguggaagcauuuuccuggcugauuaaaagaaauuacucagcuauggucaucuguuccuguuagaaggcuaugcagcauauuauauacuaugcgcauguuaugaaaugcauaauaaaaaauuuuaaaaaaucuaaaagaucuaaaaaaaaaaaaaaaaaaaaaaaaaaaaaaaaaaaaaaaaaaaaaaaaaaaaaaaaaaaaaaaaugcaucccccccccccccccccccccccccccccccaaaggcucuuuucagagccaccagaauu

SEQ ID NO: 19736 - RNA, 1892 nt, Artificial Sequence
  mRNA product Design g-1 comprising derived and/or modified sequence from HRSV(Memphis-37)__AIY60640.1__F-del_DSCav1_mut8 (opt4)
gggagacuuucccauucuguagcagaauuugguguugccuguggucuuggucccgcggagaagcuuaccauggagcugcccauccugaagaccaacgccaucaccaccauccuggccgccgugacccugugcuucgccagcagccagaacaucaccgaggaguucuaccagagcaccugcagcgccgugagcaagggcuaccugggcgcccugagaaccggcugguacaccagcgugaucaccaucgagcugagcaacaucaaggagaucaagugcaacggcaccgacgccaaggugaagcugaucaagcaggagcuggacaaguacaagaacgccgugaccgaccugcagcugcugaugcagagcacccccgccgccggcagcggcagcgccaucgccagcggcaucgccgugugcaaggugcugcaccuggagggcgaggugaacaagaucaagaacgcccugcugagcaccaacaaggccguggugagccugagcggcugcggcgugagcgugcugaccuucaaggugcuggaccugaagaacuacaucgacaagcagcugcugcccauccugaacaagcagagcugcagcauccccaacaucgagaccgugaucgaguuccagcagaagaacaacagacugcuggagaucaccagagaguucagcgugaacgccggcgugaccacccccgugagcaccuacaugcugaccaacagcgagcugcugagccugaucaacgacaugcccaucaccaacgaccagaagaagcugaugagcaacaacgugcagaucgugagacagcagagcuacagcaucaugugcaucaucaaggaggaggugcuggccuacguggugcagcugccccuguacggcgugaucgacacccccugcuggaagcugcacaccagcccccugugcaccaccaacaccaaggagggcagcaacaucugccugaccagaaccgacagaggcugguacugcgacaacgccggcagcgugagcuucuucccccaggccgagaccugcaaggugcagagcaacagaguguucugcgacaccaugaacagccugacccugcccagcgaggugaaccugugcaacaucgacaucuucaaccccaaguacgacugcaagaucaugaccagcaagaccgacgugagcagcagcgugaucaccagccugggcgccaucgugagcugcuacggcaagaccaagugcaccgccagcaacaagugcagaggcaucaucaagaccuucagcaacggcugcgacuacgugagcaacaagggcguggacaccgugagcgugggcaacacccuguacuacgugaacaagcaggagggccagagccuguacgugaagggcgagcccaucaucaacuucuacgacccccugguguuccccagcgacgaguucgacgccagcaucagccaggugaacgagaagaucaaccagagccuggccuucaucagaaagagcgacgagcugcugcacaacgugaacgugggcaagagcaccaccaacaucaugaucaccaccaucaucaucgugaucaucgugauccugcugcugcugaucgccgugggccuguuccuguacugcaaggccagaugaggacuaguggaagcauuuuccuggcugauuaaaagaaauuacucagcuauggucaucuguuccuguuagaaggcuaugcagcauauuauauacuaugcgcauguuaugaaaugcauaauaaaaaauuuuaaaaaaucuaaaagaucuaaaaaaaaaaaaaaaaaaaaaaaaaaaaaaaaaaaaaaaaaaaaaaaaaaaaaaaaaaaaaaaaugcaucccccccccccccccccccccccccccccccaaaggcucuuuucagagccaccagaauu

SEQ ID NO: 19737 - RNA, 1892 nt, Artificial Sequence
  mRNA product Design g-1 comprising derived and/or modified sequence from HRSV(Memphis-37)__AIY60640.1__F-del_DSCav1_mut8 (opt5)
gggagacuuucccauucuguagcagaauuugguguugccuguggucuuggucccgcggagaagcuuaccauggagcugcccauccucaagaccaacgccauuacaacgauccuggcugccgugacccuuugcuucgcgagcucccagaauauuacagaagaguuuuaccaaucuaccuguagcgcugucuccaaaggcuaucugggggcccucagaacaggaugguacaccucuguuaucacaauugaacugagcaacaucaaggagaucaaaugcaauggcaccgacgccaaggugaaacuuauuaagcaggaacuggauaaguauaaaaacgcugugacggaccuccagcugcugaugcaguccaccccugccgcugggucuggaagcgccaucgcguccggcauugccgucuguaaggugcuccaccuggagggggagguuaauaaaaucaagaacgcccuucugagcacaaauaaagcuguggucucucucuccggaugcggcgugagcguucugaccuucaaggugcuugaucugaagaacuacauugacaaacaacuccugccgauccugaauaagcagucuuguuccauucccaacaucgaaacagucaucgaguuucagcagaaaaauaaccggcuccuggaaauuacccgcgaguucagcgugaaugcuggcgugacgacaccugucucuaccuauaugcuuacaaacuccgagcugcucagccugaucaaugauaugcccauuaccaacgaccaaaagaaacuuauguccaacaauguucagaucgugagacagcagucuuacagcauuaugugcaucaucaaggaagaggugcuggccuaugucgugcaacucccucuguacgggguuauugauacccccuguuggaaacugcauacauccccucucugcacgaccaacacaaaggaaggaagcaauaucugucugacccggacagaccgcggcugguacugcgauaacgcggggucuguguccuuuuucccgcaggccgagaccuguaagguccagagcaauagaguguuuugcgacacgaugaacucucuuacacugcccagcgaaguuaaucucugcaacauugauaucuucaauccuaaauaugacuguaagauuaugaccuccaaaaccgaugugucuagcuccgucaucacaagccugggagcuaucgugucuugcuacggcaagaccaaauguacagccuccaacaagugccgggggauuaucaagacguuuagcaauggaugugacuaugucucuaacaaaggcguggacaccguuuccgugggcaauacacuuuacuaugucaacaagcaagaggggcagagccuguacgugaaaggagagcccauuaucaauuucuaugauccucucguuuuucccuccgacgaguucgaugcuucuauuagccaggugaacgaaaagaucaaccagucccuggccuuuauucgcaaaucugacgaacugcuccacaaugucaacgugggcaagagcaccacaaauaucaugaucaccacgauuaucauugugaucauuguuauccugcuucugcucaucgccgucgggcuguuccuguacugcaaggcuagaugaggacuaguggaagcauuuuccuggcugauuaaaagaaauuacucagcuauggucaucuguuccuguuagaaggcuaugcagcauauuauauacuaugcgcauguuaugaaaugcauaauaaaaaauuuuaaaaaaucuaaaagaucuaaaaaaaaaaaaaaaaaaaaaaaaaaaaaaaaaaaaaaaaaaaaaaaaaaaaaaaaaaaaaaaaugcaucccccccccccccccccccccccccccccccaaaggcucuuuucagagccaccagaauu

SEQ ID NO: 19738 - RNA, 1892 nt, Artificial Sequence
  mRNA product Design g-1 comprising derived and/or modified sequence from HRSV(Memphis-37)__AIY60640.1__F-del_DSCav1_mut8 (opt6)
gggagacuuucccauucuguagcagaauuugguguugccuguggucuuggucccgcggagaagcuuaccauggaacuacccauacuaaaaacaaacgcaauuacaacaauacuugccgcaguaaccuuaugcuuugccucaucccaaaacauaacagaagaauuuuaucaaucaacaugcuccgcaguaucaaaaggauaccuaggcgcucuaagaacaggaugguacacauccguaaucacaauagaacuauccaauauaaaagaaauaaaauguaauggaacagaugcaaaaguuaaauuaauaaaacaagaacuagacaaauacaaaaacgcaguuaccgaucuccaacuauuaaugcaaucaacaccagcugcaggaaguggaagcgccauagcaagcggaauagcagucugcaaaguauuacaucuugaaggcgaaguaaacaaaaucaaaaaugcccuccucucaacaaacaaagcuguaguaucccuaucaggaugcgguguaucuguucuuacauuuaaaguacucgaucuaaaaaacuacaucgauaaacaguuacuuccaauacucaacaaacaaucauguagcauaccaaacauagaaacaguaauagaauuucaacaaaaaaacaaucgacuacucgaaauaacuagagaauuuucuguaaacgcuggaguaaccacaccagugucuaccuauaugcuuacaaauagcgaacuccuaucacuaaucaaugacaugccaauaacaaaugaccagaaaaaacucaugucaaauaacguacaaauaguacgacaacaaagcuacuccauaaugugcauaaucaaagaagaaguauuagccuacguuguucaacuaccauuauauggaguuauagacacuccaugcuggaaauuacauacaagcccacucuguacaacaaacacaaaagaaggcucaaacauaugcuuaacaagaacagauagaggaugguacugcgauaacgcaggcucagucucauuuuuuccacaagccgaaaccugcaaaguacaaucaaauagaguuuuuugcgacacaaugaacucacucacucuaccaagugaaguaaaucucuguaauaucgacauauucaacccaaaauaugacugcaaaauaaugacaucuaaaaccgauguauccucaagcguaaucacaucauuaggagcuauaguuuccugcuacgguaaaacaaaaugcacagcauccaacaaaugucgcgguaucaucaaaacauucuccaacggaugugauuacguaucaaacaaaggugucgacaccguaagcguaggcaacacuuuauacuauguaaacaaacaagaaggacaaagucuauauguaaaaggagaaccaauaauaaacuucuaugacccccuaguauucccuuccgacgaauuugaugcaagcauuucacaaguuaacgaaaaaaucaaucaaucccuugcuuucauaagaaaaucagacgaauuacuacacaacguaaacguaggaaaaagcacaacaaauaucaugauuacaacaauaauaauuguaauaauaguaauacuccucuuacuuauagcagucggcuuauuccuuuacugcaaagcaagauaaggacuaguggaagcauuuuccuggcugauuaaaagaaauuacucagcuauggucaucuguuccuguuagaaggcuaugcagcauauuauauacuaugcgcauguuaugaaaugcauaauaaaaaauuuuaaaaaaucuaaaagaucuaaaaaaaaaaaaaaaaaaaaaaaaaaaaaaaaaaaaaaaaaaaaaaaaaaaaaaaaaaaaaaaaugcaucccccccccccccccccccccccccccccccaaaggcucuuuucagagccaccagaauu

SEQ ID NO: 19739 - RNA, 1892 nt, Artificial Sequence
  mRNA product Design g-1 comprising derived and/or modified sequence from HRSV(Memphis-37)__AIY60640.1__F-del_DSCav1_mut8 (opt11)
gggagacuuucccauucuguagcagaauuugguguugccuguggucuuggucccgcggagaagcuuaccauggaacuccccauccuaaaaaccaacgcaaucaccaccauccucgccgccguaacacucugcuuugcaagcucccaaaacaucaccgaagaauuuuaccaaucuaccugcagcgccguaucuaaaggauaccuaggagcccucagaaccgguugguacaccucugucaucacaauagaacucuccaacaucaaagaaaucaaaugcaacggcaccgacgccaaagucaaacucaucaaacaagaacucgacaaauauaaaaacgccguaaccgaccuccaacuccucaugcaauccacccccgccgccggcaguggcuccgcuaucgccuccggaaucgccguuugcaaaguccugcaccuagaaggcgaagucaacaaaaucaaaaacgcccugcucucaaccaacaaagcugucguaagccucuccggcugcggagucuccguccuuaccuucaaaguacucgaccuuaaaaacuacaucgacaaacaacuucuccccauacucaauaaacaauccugcuccauacccaacaucgaaacagucaucgaguuccaacagaaaaauaaccgccuccucgaaauaacccgcgaguucuccgucaacgcaggcgucaccaccccagucuccaccuacaugcugacaaacuccgaacuccuaucccucaucaacgacaugcccaucaccaacgaccaaaagaaacucaugagcaauaacguccaaaucguacgacaacaauccuacagcaucauguguaucaucaaagaagaaguacucgccuacgucguccaacucccacuauacggcgucaucgacacaccaugcuggaaacuucacaccuccccacucugcaccacaaacacaaaagaaggcuccaacaucugccuuacccgaaccgaccgcgggugguacugcgacaacgccggaucagucucguucuuuccccaagccgaaaccugcaaaguacaaucaaaucgcgucuucugcgacaccaugaacuccuuaacacuaccauccgaaguaaaccucugcaacauagacaucuucaacccaaaauacgacugcaaaaucaugaccuccaaaaccgacguauccuccuccguaaucaccagccucggcgcaauagucucaugcuacggcaaaaccaaaugcaccgccuccaacaaaugccgcggcaucauaaaaacuuucucuaacggaugcgacuacgucagcaacaaaggcgucgacaccguauccguagguaauacacuuuacuacgucaauaaacaagaaggccaaucccucuacgucaaaggagaacccaucauaaacuucuacgacccccucgucuuccccuccgacgaguucgacgccuccaucagccaggucaacgaaaagaucaaccaaucacucgccuucauccgcaaaagcgacgaacuccuccacaacguaaacgucggcaaauccacaaccaacauaaugaucaccacuaucaucaucgugauaaucgucauuuuacuucuccucaucgccguaggccucuuccuauacugcaaagcccgcuaaggacuaguggaagcauuuuccuggcugauuaaaagaaauuacucagcuauggucaucuguuccuguuagaaggcuaugcagcauauuauauacuaugcgcauguuaugaaaugcauaauaaaaaauuuuaaaaaaucuaaaagaucuaaaaaaaaaaaaaaaaaaaaaaaaaaaaaaaaaaaaaaaaaaaaaaaaaaaaaaaaaaaaaaaaugcaucccccccccccccccccccccccccccccccaaaggcucuuuucagagccaccagaauu

SEQ ID NO: 19740 - RNA, 1907 nt, Artificial Sequence
  mRNA product Design g-2 comprising derived and/or modified sequence from HRSV(Memphis-37)__AIY60640.1__F-del_DSCav1_mut8 (opt1)
gggagaguccgcucagccagguugcagaagcggcuuagcguguguccuaaucuucucucugcguguagguaggccugugccgcaaacaagcuuaccauggagcugcccauccucaagaccaacgccaucaccacgauccuggccgcggugacccugugcuucgccagcucccagaacaucaccgaggaguucuaccagagcacgugcuccgccgucagcaagggcuaccucggcgcccugcgcaccgggugguacaccagcgugaucaccaucgagcuguccaacaucaaggagaucaagugcaacggcaccgacgccaaggugaagcucaucaagcaggagcuggacaaguacaagaacgcggucacggaccugcagcuccugaugcagagcaccccggccgccggcuccgggagcgcgaucgccuccggcaucgccgucugcaaggugcugcaccucgagggcgaggugaacaagaucaagaacgcccugcuguccaccaacaaggccgucgugagccucuccggcugcggggugagcguccugaccuucaaggugcuggaccucaagaacuacaucgacaagcagcugcugcccauccugaacaagcagagcugcuccauccccaacaucgagaccgucaucgaguuccagcagaagaacaaccgccuccuggagaucacgcgggaguucagcgugaacgcgggcgugaccacccccgucuccaccuacaugcugacgaacagcgagcuccugucccugaucaacgacaugccgaucaccaacgaccagaagaagcucaugagcaacaacgugcagaucgugcgccagcaguccuacagcaucaugugcaucaucaaggaggagguccuggccuacguggugcagcugccccucuacggggucaucgacacccccugcuggaagcugcacaccagcccccugugcacgaccaacaccaaggagggcuccaacaucugccucacccggacggaccgcgggugguacugcgacaacgccggcagcguguccuucuucccgcaggccgagaccugcaagguccagagcaaccggguguucugcgacaccaugaacucccugacccugcccagcgaggugaaccucugcaacaucgacaucuucaaccccaaguacgacugcaagaucaugacguccaagaccgacgucagcuccagcgugaucaccucccugggcgccaucgugagcugcuacgggaagaccaagugcacggcgagcaacaagugccgcggcaucaucaagaccuucuccaacgggugcgacuacgucagcaacaagggcguggacaccguguccgucggcaacacccuguacuacgugaacaagcaggagggccagagccucuacgugaagggggagcccaucaucaacuucuacgacccgcuggucuuccccuccgacgaguucgacgccagcaucucccaggugaacgagaagaucaaccagagccuggccuucauccggaaguccgacgagcuccugcacaacgugaacgucggcaagagcaccacgaacaucaugaucaccaccaucaucaucgugaucaucgugauccugcugcuccugaucgccgucgggcuguuccucuacugcaaggcccgcugaggacuaguaauaaggaaacuguaugaaugucugugggcaggaagugaagagauccuucuguaaagguuuuuggaauuaugucugcugaauaauaaacuuuuuugaaauaauaaaucugguagaaaaaugagaucuaaaaaaaaaaaaaaaaaaaaaaaaaaaaaaaaaaaaaaaaaaaaaaaaaaaaaaaaaaaaaaaaugcaucccccccccccccccccccccccccccccccaaaggcucuuuucagagccaccagaauu

SEQ ID NO: 19741 - RNA, 1907 nt, Artificial Sequence
  mRNA product Design g-2 comprising derived and/or modified sequence from HRSV(Memphis-37)__AIY60640.1__F-del_DSCav1_mut8 (opt1)
gggagaguccgcucagccagguugcagaagcggcuuagcguguguccuaaucuucucucugcguguagguaggccugugccgcaaacaagcuuaccauggagcugcccauccucaagaccaacgccaucaccacgauccuggccgcggugacccugugcuucgccagcucccagaacaucaccgaggaguucuaccagagcacgugcuccgccgucagcaagggcuaccucggggcccugcgcaccggcugguacaccuccgugaucaccaucgagcugagcaacaucaaggagaucaagugcaacgggaccgacgccaaggugaagcucaucaagcaggagcuggacaaguacaagaacgcggucacggaccugcagcuccugaugcaguccaccccggccgccggcagcggguccgccaucgcgagcggcaucgccgugugcaaggugcugcaccucgagggcgaggucaacaagaucaagaacgcccugcuguccaccaacaaggccguggugagccucuccgggugcggcgucagcgugcugaccuucaaggugcuggaccucaagaacuacaucgacaagcagcugcugcccauccucaacaagcaguccugcagcauccccaacaucgagacggucaucgaguuccagcagaagaacaaccggcugcuggagaucacccgcgaguucuccgugaacgccggggugaccacccccgucagcacguacaugcucaccaacuccgagcugcugagccucaucaacgacaugccgaucaccaacgaccagaagaagcugaugagcaacaacgugcagaucgugcggcagcaguccuacagcaucaugugcaucaucaaggaggagguccuggcguacguggugcagcucccccuguacggcgucaucgacacccccugcuggaagcugcacacgagcccccucugcaccaccaacaccaaggagggguccaacaucugccugacgcgcaccgaccggggcugguacugcgacaacgccggcuccgugagcuucuucccgcaggccgagaccugcaaggugcaguccaaccgcgucuucugcgacaccaugaacagccugacgcuccccuccgaggugaaccugugcaacaucgacaucuucaaccccaaguacgacugcaagaucaugaccagcaagaccgacgucuccagcuccgugaucaccagccugggggccaucguguccugcuacggcaagacgaagugcaccgccagcaacaagugccgggggaucaucaagaccuucuccaacggcugcgacuacgucagcaacaagggcguggacaccguguccgucgggaacacgcucuacuacgugaacaagcaggagggccagagccuguacgugaagggggagcccaucaucaacuucuacgacccgcuggucuuccccagcgacgaguucgacgcguccaucagccaggugaacgagaagaucaaccagucccucgccuucauccgcaagagcgacgagcugcugcacaacgugaacgucggcaaguccaccaccaacaucaugaucaccaccaucaucaucgugaucaucgugauccuccugcugcucaucgccgucgggcuguuccuguacugcaaggcccggugaggacuaguaauaaggaaacuguaugaaugucugugggcaggaagugaagagauccuucuguaaagguuuuuggaauuaugucugcugaauaauaaacuuuuuugaaauaauaaaucugguagaaaaaugagaucuaaaaaaaaaaaaaaaaaaaaaaaaaaaaaaaaaaaaaaaaaaaaaaaaaaaaaaaaaaaaaaaaugcaucccccccccccccccccccccccccccccccaaaggcucuuuucagagccaccagaauu

SEQ ID NO: 19742 - RNA, 1907 nt, Artificial Sequence
  mRNA product Design g-2 comprising derived and/or modified sequence from HRSV(Memphis-37)__AIY60640.1__F-del_DSCav1_mut8 (opt2)
gggagaguccgcucagccagguugcagaagcggcuuagcguguguccuaaucuucucucugcguguagguaggccugugccgcaaacaagcuuaccauggagcuccccauccucaagaccaacgccaucaccaccauccucgccgccgucacccucugcuucgccuccucccagaacaucaccgaggaguucuaccaguccaccugcuccgccgucuccaagggcuaccucggcgcccuccgcaccggcugguacaccuccgucaucaccaucgagcucuccaacaucaaggagaucaagugcaacggcaccgacgccaaggucaagcucaucaagcaggagcucgacaaguacaagaacgccgucaccgaccuccagcuccucaugcaguccacccccgccgccggcuccggcuccgccaucgccuccggcaucgccgucugcaagguccuccaccucgagggcgaggucaacaagaucaagaacgcccuccucuccaccaacaaggccgucgucucccucuccggcugcggcgucuccguccucaccuucaagguccucgaccucaagaacuacaucgacaagcagcuccuccccauccucaacaagcaguccugcuccauccccaacaucgagaccgucaucgaguuccagcagaagaacaaccgccuccucgagaucacccgcgaguucuccgucaacgccggcgucaccacccccgucuccaccuacaugcucaccaacuccgagcuccucucccucaucaacgacaugcccaucaccaacgaccagaagaagcucauguccaacaacguccagaucguccgccagcaguccuacuccaucaugugcaucaucaaggaggagguccucgccuacgucguccagcucccccucuacggcgucaucgacacccccugcuggaagcuccacaccuccccccucugcaccaccaacaccaaggagggcuccaacaucugccucacccgcaccgaccgcggcugguacugcgacaacgccggcuccgucuccuucuucccccaggccgagaccugcaagguccaguccaaccgcgucuucugcgacaccaugaacucccucacccuccccuccgaggucaaccucugcaacaucgacaucuucaaccccaaguacgacugcaagaucaugaccuccaagaccgacgucuccuccuccgucaucaccucccucggcgccaucgucuccugcuacggcaagaccaagugcaccgccuccaacaagugccgcggcaucaucaagaccuucuccaacggcugcgacuacgucuccaacaagggcgucgacaccgucuccgucggcaacacccucuacuacgucaacaagcaggagggccagucccucuacgucaagggcgagcccaucaucaacuucuacgacccccucgucuuccccuccgacgaguucgacgccuccaucucccaggucaacgagaagaucaaccagucccucgccuucauccgcaaguccgacgagcuccuccacaacgucaacgucggcaaguccaccaccaacaucaugaucaccaccaucaucaucgucaucaucgucauccuccuccuccucaucgccgucggccucuuccucuacugcaaggcccgcugaggacuaguaauaaggaaacuguaugaaugucugugggcaggaagugaagagauccuucuguaaagguuuuuggaauuaugucugcugaauaauaaacuuuuuugaaauaauaaaucugguagaaaaaugagaucuaaaaaaaaaaaaaaaaaaaaaaaaaaaaaaaaaaaaaaaaaaaaaaaaaaaaaaaaaaaaaaaaugcaucccccccccccccccccccccccccccccccaaaggcucuuuucagagccaccagaauu

SEQ ID NO: 19743 - RNA, 1907 nt, Artificial Sequence
  mRNA product Design g-2 comprising derived and/or modified sequence from HRSV(Memphis-37)__AIY60640.1__F-del_DSCav1_mut8 (opt3)
gggagaguccgcucagccagguugcagaagcggcuuagcguguguccuaaucuucucucugcguguagguaggccugugccgcaaacaagcuuaccauggagcugcccauccucaagaccaacgccauuacaacuauacuugcugcagugacgcugugcuucgccagcucccagaauaucaccgaagaguuuuaccaaucuacauguucagcggucaguaaaggcuauuugggggcuuuaagaacuggaugguacaccagcguuauuacaaucgaacuguccaacauuaaggagaucaaaugcaaugguaccgacgccaaggugaaacuaauaaagcaggaacucgauaaguauaaaaacgcaguaacugaccugcagcuucugaugcagucuacuccugccgcuggcucggggucagcaaucgccagcggaauugcuguguguaaggucuugcaccucgagggcgaggugaauaaaaucaagaacgcccugcugaguaccaauaaagcgguugugucccucucugguugcggggucagcguguuaacguucaagguacuggaucuuaagaacuacauugacaaacaauugcugccaauccuaaauaagcaguccuguucaauaccgaacauugaaacuguuaucgaguuucagcagaaaaauaacaggcuccuggaaauuacccgggaguucagugugaaugcaggagucacaacucccgugagcaccuauaugcuuacaaacucugagcuguugucccucaucaaugauaugccuaucaccaacgaccaaaagaaacugaugucaaacaaugugcagauuguccgccagcagagcuacaguauaaugugcaucauuaaggaagagguuuuagccuaugugguacaacugccacucuacggcgugaucgauacgcccuguuggaaacuucauacuucuccucugugcacaaccaacacuaaggaaggcuccaauauauguuugacacgaaccgaccgugggugguacugcgauaacgcuggaagcgucucguuuuucccacaggccgagacguguaaggugcagucuaauagaguuuucugcgacaccaugaacucccuaacacugcccucagaagugaaucucugcaacauugauaucuucaauccuaaauaugacuguaagaucaugacaaguaaaaccgaugucagcuccucugugauuacaagccugggugcaaucguaucaugcuacggcaagacuaaauguaccgcuaguaacaagugcagggggauuauaaagacauuuuccaauggaugugacuauguuagcaacaaaggcguggacaccgucucuguggguaauacucuuuacuaugucaacaagcaagaggggcagucacuguacgugaaaggagagccaaucauuaauuucuaugauccguugguuuuucccagugacgaauuugaugccagcaucucccaggugaacgagaagaucaaccagucucucgcguuuauucggaaaucggacgaacuguuacacaauguaaacgucggcaagagcacgacaaauauaaugaucaccacuauuaucauugugaucauaguuauccugcuacuccugauugccgugggccuuuucuuguacugcaaggcacgcugaggacuaguaauaaggaaacuguaugaaugucugugggcaggaagugaagagauccuucuguaaagguuuuuggaauuaugucugcugaauaauaaacuuuuuugaaauaauaaaucugguagaaaaaugagaucuaaaaaaaaaaaaaaaaaaaaaaaaaaaaaaaaaaaaaaaaaaaaaaaaaaaaaaaaaaaaaaaaugcaucccccccccccccccccccccccccccccccaaaggcucuuuucagagccaccagaauu

SEQ ID NO: 19744 - RNA, 1907 nt, Artificial Sequence
  mRNA product Design g-2 comprising derived and/or modified sequence from HRSV(Memphis-37)__AIY60640.1__F-del_DSCav1_mut8 (opt4)
gggagaguccgcucagccagguugcagaagcggcuuagcguguguccuaaucuucucucugcguguagguaggccugugccgcaaacaagcuuaccauggagcugcccauccugaagaccaacgccaucaccaccauccuggccgccgugacccugugcuucgccagcagccagaacaucaccgaggaguucuaccagagcaccugcagcgccgugagcaagggcuaccugggcgcccugagaaccggcugguacaccagcgugaucaccaucgagcugagcaacaucaaggagaucaagugcaacggcaccgacgccaaggugaagcugaucaagcaggagcuggacaaguacaagaacgccgugaccgaccugcagcugcugaugcagagcacccccgccgccggcagcggcagcgccaucgccagcggcaucgccgugugcaaggugcugcaccuggagggcgaggugaacaagaucaagaacgcccugcugagcaccaacaaggccguggugagccugagcggcugcggcgugagcgugcugaccuucaaggugcuggaccugaagaacuacaucgacaagcagcugcugcccauccugaacaagcagagcugcagcauccccaacaucgagaccgugaucgaguuccagcagaagaacaacagacugcuggagaucaccagagaguucagcgugaacgccggcgugaccacccccgugagcaccuacaugcugaccaacagcgagcugcugagccugaucaacgacaugcccaucaccaacgaccagaagaagcugaugagcaacaacgugcagaucgugagacagcagagcuacagcaucaugugcaucaucaaggaggaggugcuggccuacguggugcagcugccccuguacggcgugaucgacacccccugcuggaagcugcacaccagcccccugugcaccaccaacaccaaggagggcagcaacaucugccugaccagaaccgacagaggcugguacugcgacaacgccggcagcgugagcuucuucccccaggccgagaccugcaaggugcagagcaacagaguguucugcgacaccaugaacagccugacccugcccagcgaggugaaccugugcaacaucgacaucuucaaccccaaguacgacugcaagaucaugaccagcaagaccgacgugagcagcagcgugaucaccagccugggcgccaucgugagcugcuacggcaagaccaagugcaccgccagcaacaagugcagaggcaucaucaagaccuucagcaacggcugcgacuacgugagcaacaagggcguggacaccgugagcgugggcaacacccuguacuacgugaacaagcaggagggccagagccuguacgugaagggcgagcccaucaucaacuucuacgacccccugguguuccccagcgacgaguucgacgccagcaucagccaggugaacgagaagaucaaccagagccuggccuucaucagaaagagcgacgagcugcugcacaacgugaacgugggcaagagcaccaccaacaucaugaucaccaccaucaucaucgugaucaucgugauccugcugcugcugaucgccgugggccuguuccuguacugcaaggccagaugaggacuaguaauaaggaaacuguaugaaugucugugggcaggaagugaagagauccuucuguaaagguuuuuggaauuaugucugcugaauaauaaacuuuuuugaaauaauaaaucugguagaaaaaugagaucuaaaaaaaaaaaaaaaaaaaaaaaaaaaaaaaaaaaaaaaaaaaaaaaaaaaaaaaaaaaaaaaaugcaucccccccccccccccccccccccccccccccaaaggcucuuuucagagccaccagaauu

SEQ ID NO: 19745 - RNA, 1907 nt, Artificial Sequence
  mRNA product Design g-2 comprising derived and/or modified sequence from HRSV(Memphis-37)__AIY60640.1__F-del_DSCav1_mut8 (opt5)
gggagaguccgcucagccagguugcagaagcggcuuagcguguguccuaaucuucucucugcguguagguaggccugugccgcaaacaagcuuaccauggagcugcccauccucaagaccaacgccauuacaacgauccuggcugccgugacccuuugcuucgcgagcucccagaauauuacagaagaguuuuaccaaucuaccuguagcgcugucuccaaaggcuaucugggggcccucagaacaggaugguacaccucuguuaucacaauugaacugagcaacaucaaggagaucaaaugcaauggcaccgacgccaaggugaaacuuauuaagcaggaacuggauaaguauaaaaacgcugugacggaccuccagcugcugaugcaguccaccccugccgcugggucuggaagcgccaucgcguccggcauugccgucuguaaggugcuccaccuggagggggagguuaauaaaaucaagaacgcccuucugagcacaaauaaagcuguggucucucucuccggaugcggcgugagcguucugaccuucaaggugcuugaucugaagaacuacauugacaaacaacuccugccgauccugaauaagcagucuuguuccauucccaacaucgaaacagucaucgaguuucagcagaaaaauaaccggcuccuggaaauuacccgcgaguucagcgugaaugcuggcgugacgacaccugucucuaccuauaugcuuacaaacuccgagcugcucagccugaucaaugauaugcccauuaccaacgaccaaaagaaacuuauguccaacaauguucagaucgugagacagcagucuuacagcauuaugugcaucaucaaggaagaggugcuggccuaugucgugcaacucccucuguacgggguuauugauacccccuguuggaaacugcauacauccccucucugcacgaccaacacaaaggaaggaagcaauaucugucugacccggacagaccgcggcugguacugcgauaacgcggggucuguguccuuuuucccgcaggccgagaccuguaagguccagagcaauagaguguuuugcgacacgaugaacucucuuacacugcccagcgaaguuaaucucugcaacauugauaucuucaauccuaaauaugacuguaagauuaugaccuccaaaaccgaugugucuagcuccgucaucacaagccugggagcuaucgugucuugcuacggcaagaccaaauguacagccuccaacaagugccgggggauuaucaagacguuuagcaauggaugugacuaugucucuaacaaaggcguggacaccguuuccgugggcaauacacuuuacuaugucaacaagcaagaggggcagagccuguacgugaaaggagagcccauuaucaauuucuaugauccucucguuuuucccuccgacgaguucgaugcuucuauuagccaggugaacgaaaagaucaaccagucccuggccuuuauucgcaaaucugacgaacugcuccacaaugucaacgugggcaagagcaccacaaauaucaugaucaccacgauuaucauugugaucauuguuauccugcuucugcucaucgccgucgggcuguuccuguacugcaaggcuagaugaggacuaguaauaaggaaacuguaugaaugucugugggcaggaagugaagagauccuucuguaaagguuuuuggaauuaugucugcugaauaauaaacuuuuuugaaauaauaaaucugguagaaaaaugagaucuaaaaaaaaaaaaaaaaaaaaaaaaaaaaaaaaaaaaaaaaaaaaaaaaaaaaaaaaaaaaaaaaugcaucccccccccccccccccccccccccccccccaaaggcucuuuucagagccaccagaauu

SEQ ID NO: 19746 - RNA, 1907 nt, Artificial Sequence
  mRNA product Design g-2 comprising derived and/or modified sequence from HRSV(Memphis-37)__AIY60640.1__F-del_DSCav1_mut8 (opt6)
gggagaguccgcucagccagguugcagaagcggcuuagcguguguccuaaucuucucucugcguguagguaggccugugccgcaaacaagcuuaccauggaacuacccauacuaaaaacaaacgcaauuacaacaauacuugccgcaguaaccuuaugcuuugccucaucccaaaacauaacagaagaauuuuaucaaucaacaugcuccgcaguaucaaaaggauaccuaggcgcucuaagaacaggaugguacacauccguaaucacaauagaacuauccaauauaaaagaaauaaaauguaauggaacagaugcaaaaguuaaauuaauaaaacaagaacuagacaaauacaaaaacgcaguuaccgaucuccaacuauuaaugcaaucaacaccagcugcaggaaguggaagcgccauagcaagcggaauagcagucugcaaaguauuacaucuugaaggcgaaguaaacaaaaucaaaaaugcccuccucucaacaaacaaagcuguaguaucccuaucaggaugcgguguaucuguucuuacauuuaaaguacucgaucuaaaaaacuacaucgauaaacaguuacuuccaauacucaacaaacaaucauguagcauaccaaacauagaaacaguaauagaauuucaacaaaaaaacaaucgacuacucgaaauaacuagagaauuuucuguaaacgcuggaguaaccacaccagugucuaccuauaugcuuacaaauagcgaacuccuaucacuaaucaaugacaugccaauaacaaaugaccagaaaaaacucaugucaaauaacguacaaauaguacgacaacaaagcuacuccauaaugugcauaaucaaagaagaaguauuagccuacguuguucaacuaccauuauauggaguuauagacacuccaugcuggaaauuacauacaagcccacucuguacaacaaacacaaaagaaggcucaaacauaugcuuaacaagaacagauagaggaugguacugcgauaacgcaggcucagucucauuuuuuccacaagccgaaaccugcaaaguacaaucaaauagaguuuuuugcgacacaaugaacucacucacucuaccaagugaaguaaaucucuguaauaucgacauauucaacccaaaauaugacugcaaaauaaugacaucuaaaaccgauguauccucaagcguaaucacaucauuaggagcuauaguuuccugcuacgguaaaacaaaaugcacagcauccaacaaaugucgcgguaucaucaaaacauucuccaacggaugugauuacguaucaaacaaaggugucgacaccguaagcguaggcaacacuuuauacuauguaaacaaacaagaaggacaaagucuauauguaaaaggagaaccaauaauaaacuucuaugacccccuaguauucccuuccgacgaauuugaugcaagcauuucacaaguuaacgaaaaaaucaaucaaucccuugcuuucauaagaaaaucagacgaauuacuacacaacguaaacguaggaaaaagcacaacaaauaucaugauuacaacaauaauaauuguaauaauaguaauacuccucuuacuuauagcagucggcuuauuccuuuacugcaaagcaagauaaggacuaguaauaaggaaacuguaugaaugucugugggcaggaagugaagagauccuucuguaaagguuuuuggaauuaugucugcugaauaauaaacuuuuuugaaauaauaaaucugguagaaaaaugagaucuaaaaaaaaaaaaaaaaaaaaaaaaaaaaaaaaaaaaaaaaaaaaaaaaaaaaaaaaaaaaaaaaugcaucccccccccccccccccccccccccccccccaaaggcucuuuucagagccaccagaauu

SEQ ID NO: 19747 - RNA, 1907 nt, Artificial Sequence
  mRNA product Design g-2 comprising derived and/or modified sequence from HRSV(Memphis-37)__AIY60640.1__F-del_DSCav1_mut8 (opt11)
gggagaguccgcucagccagguugcagaagcggcuuagcguguguccuaaucuucucucugcguguagguaggccugugccgcaaacaagcuuaccauggaacuccccauccuaaaaaccaacgcaaucaccaccauccucgccgccguaacacucugcuuugcaagcucccaaaacaucaccgaagaauuuuaccaaucuaccugcagcgccguaucuaaaggauaccuaggagcccucagaaccgguugguacaccucugucaucacaauagaacucuccaacaucaaagaaaucaaaugcaacggcaccgacgccaaagucaaacucaucaaacaagaacucgacaaauauaaaaacgccguaaccgaccuccaacuccucaugcaauccacccccgccgccggcaguggcuccgcuaucgccuccggaaucgccguuugcaaaguccugcaccuagaaggcgaagucaacaaaaucaaaaacgcccugcucucaaccaacaaagcugucguaagccucuccggcugcggagucuccguccuuaccuucaaaguacucgaccuuaaaaacuacaucgacaaacaacuucuccccauacucaauaaacaauccugcuccauacccaacaucgaaacagucaucgaguuccaacagaaaaauaaccgccuccucgaaauaacccgcgaguucuccgucaacgcaggcgucaccaccccagucuccaccuacaugcugacaaacuccgaacuccuaucccucaucaacgacaugcccaucaccaacgaccaaaagaaacucaugagcaauaacguccaaaucguacgacaacaauccuacagcaucauguguaucaucaaagaagaaguacucgccuacgucguccaacucccacuauacggcgucaucgacacaccaugcuggaaacuucacaccuccccacucugcaccacaaacacaaaagaaggcuccaacaucugccuuacccgaaccgaccgcgggugguacugcgacaacgccggaucagucucguucuuuccccaagccgaaaccugcaaaguacaaucaaaucgcgucuucugcgacaccaugaacuccuuaacacuaccauccgaaguaaaccucugcaacauagacaucuucaacccaaaauacgacugcaaaaucaugaccuccaaaaccgacguauccuccuccguaaucaccagccucggcgcaauagucucaugcuacggcaaaaccaaaugcaccgccuccaacaaaugccgcggcaucauaaaaacuuucucuaacggaugcgacuacgucagcaacaaaggcgucgacaccguauccguagguaauacacuuuacuacgucaauaaacaagaaggccaaucccucuacgucaaaggagaacccaucauaaacuucuacgacccccucgucuuccccuccgacgaguucgacgccuccaucagccaggucaacgaaaagaucaaccaaucacucgccuucauccgcaaaagcgacgaacuccuccacaacguaaacgucggcaaauccacaaccaacauaaugaucaccacuaucaucaucgugauaaucgucauuuuacuucuccucaucgccguaggccucuuccuauacugcaaagcccgcuaaggacuaguaauaaggaaacuguaugaaugucugugggcaggaagugaagagauccuucuguaaagguuuuuggaauuaugucugcugaauaauaaacuuuuuugaaauaauaaaucugguagaaaaaugagaucuaaaaaaaaaaaaaaaaaaaaaaaaaaaaaaaaaaaaaaaaaaaaaaaaaaaaaaaaaaaaaaaaugcaucccccccccccccccccccccccccccccccaaaggcucuuuucagagccaccagaauu

SEQ ID NO: 19748 - RNA, 2139 nt, Artificial Sequence
  mRNA product Design g-3 comprising derived and/or modified sequence from HRSV(Memphis-37)__AIY60640.1__F-del_DSCav1_mut8 (opt1)
gggagaguccgcucagccagguugcagaagcggcuuagcguguguccuaaucuucucucugcguguagguaggccugugccgcaaacaagcuuaccauggagcugcccauccucaagaccaacgccaucaccacgauccuggccgcggugacccugugcuucgccagcucccagaacaucaccgaggaguucuaccagagcacgugcuccgccgucagcaagggcuaccucggcgcccugcgcaccgggugguacaccagcgugaucaccaucgagcuguccaacaucaaggagaucaagugcaacggcaccgacgccaaggugaagcucaucaagcaggagcuggacaaguacaagaacgcggucacggaccugcagcuccugaugcagagcaccccggccgccggcuccgggagcgcgaucgccuccggcaucgccgucugcaaggugcugcaccucgagggcgaggugaacaagaucaagaacgcccugcuguccaccaacaaggccgucgugagccucuccggcugcggggugagcguccugaccuucaaggugcuggaccucaagaacuacaucgacaagcagcugcugcccauccugaacaagcagagcugcuccauccccaacaucgagaccgucaucgaguuccagcagaagaacaaccgccuccuggagaucacgcgggaguucagcgugaacgcgggcgugaccacccccgucuccaccuacaugcugacgaacagcgagcuccugucccugaucaacgacaugccgaucaccaacgaccagaagaagcucaugagcaacaacgugcagaucgugcgccagcaguccuacagcaucaugugcaucaucaaggaggagguccuggccuacguggugcagcugccccucuacggggucaucgacacccccugcuggaagcugcacaccagcccccugugcacgaccaacaccaaggagggcuccaacaucugccucacccggacggaccgcgggugguacugcgacaacgccggcagcguguccuucuucccgcaggccgagaccugcaagguccagagcaaccggguguucugcgacaccaugaacucccugacccugcccagcgaggugaaccucugcaacaucgacaucuucaaccccaaguacgacugcaagaucaugacguccaagaccgacgucagcuccagcgugaucaccucccugggcgccaucgugagcugcuacgggaagaccaagugcacggcgagcaacaagugccgcggcaucaucaagaccuucuccaacgggugcgacuacgucagcaacaagggcguggacaccguguccgucggcaacacccuguacuacgugaacaagcaggagggccagagccucuacgugaagggggagcccaucaucaacuucuacgacccgcuggucuuccccuccgacgaguucgacgccagcaucucccaggugaacgagaagaucaaccagagccuggccuucauccggaaguccgacgagcuccugcacaacgugaacgucggcaagagcaccacgaacaucaugaucaccaccaucaucaucgugaucaucgugauccugcugcuccugaucgccgucgggcuguuccucuacugcaaggcccgcugaggacuagugaagggaacacccaaauuuaauucagccuuaagcacaauuaauuaagagugaaacguaauuguacaagcaguuggucacccaccauagggcaugaucaacaccgcaaccuuuccuuuuucccccagugauucugaaaaaccccucuucccuucagcuugcuuagauguuccaaauuuaguaagcuuaaggcggccuacagaagaaaaagaaaaaaaaggccacaaaaguucccucucacuuucaguaaauaaaauaaaagcagcaacagaaauaaagaaauaaaugaaauucaaaaugaaauaaauauuguguugugcagcauuaaaaaaucaauaaaaauuaaaaaugagcaagaucuaaaaaaaaaaaaaaaaaaaaaaaaaaaaaaaaaaaaaaaaaaaaaaaaaaaaaaaaaaaaaaaaugcaucccccccccccccccccccccccccccccccaaaggcucuuuucagagccaccagaauu

SEQ ID NO: 19749 - RNA, 2139 nt, Artificial Sequence
  mRNA product Design g-3 comprising derived and/or modified sequence from HRSV(Memphis-37)__AIY60640.1__F-del_DSCav1_mut8 (opt1)
gggagaguccgcucagccagguugcagaagcggcuuagcguguguccuaaucuucucucugcguguagguaggccugugccgcaaacaagcuuaccauggagcugcccauccucaagaccaacgccaucaccacgauccuggccgcggugacccugugcuucgccagcucccagaacaucaccgaggaguucuaccagagcacgugcuccgccgucagcaagggcuaccucggggcccugcgcaccggcugguacaccuccgugaucaccaucgagcugagcaacaucaaggagaucaagugcaacgggaccgacgccaaggugaagcucaucaagcaggagcuggacaaguacaagaacgcggucacggaccugcagcuccugaugcaguccaccccggccgccggcagcggguccgccaucgcgagcggcaucgccgugugcaaggugcugcaccucgagggcgaggucaacaagaucaagaacgcccugcuguccaccaacaaggccguggugagccucuccgggugcggcgucagcgugcugaccuucaaggugcuggaccucaagaacuacaucgacaagcagcugcugcccauccucaacaagcaguccugcagcauccccaacaucgagacggucaucgaguuccagcagaagaacaaccggcugcuggagaucacccgcgaguucuccgugaacgccggggugaccacccccgucagcacguacaugcucaccaacuccgagcugcugagccucaucaacgacaugccgaucaccaacgaccagaagaagcugaugagcaacaacgugcagaucgugcggcagcaguccuacagcaucaugugcaucaucaaggaggagguccuggcguacguggugcagcucccccuguacggcgucaucgacacccccugcuggaagcugcacacgagcccccucugcaccaccaacaccaaggagggguccaacaucugccugacgcgcaccgaccggggcugguacugcgacaacgccggcuccgugagcuucuucccgcaggccgagaccugcaaggugcaguccaaccgcgucuucugcgacaccaugaacagccugacgcuccccuccgaggugaaccugugcaacaucgacaucuucaaccccaaguacgacugcaagaucaugaccagcaagaccgacgucuccagcuccgugaucaccagccugggggccaucguguccugcuacggcaagacgaagugcaccgccagcaacaagugccgggggaucaucaagaccuucuccaacggcugcgacuacgucagcaacaagggcguggacaccguguccgucgggaacacgcucuacuacgugaacaagcaggagggccagagccuguacgugaagggggagcccaucaucaacuucuacgacccgcuggucuuccccagcgacgaguucgacgcguccaucagccaggugaacgagaagaucaaccagucccucgccuucauccgcaagagcgacgagcugcugcacaacgugaacgucggcaaguccaccaccaacaucaugaucaccaccaucaucaucgugaucaucgugauccuccugcugcucaucgccgucgggcuguuccuguacugcaaggcccggugaggacuagugaagggaacacccaaauuuaauucagccuuaagcacaauuaauuaagagugaaacguaauuguacaagcaguuggucacccaccauagggcaugaucaacaccgcaaccuuuccuuuuucccccagugauucugaaaaaccccucuucccuucagcuugcuuagauguuccaaauuuaguaagcuuaaggcggccuacagaagaaaaagaaaaaaaaggccacaaaaguucccucucacuuucaguaaauaaaauaaaagcagcaacagaaauaaagaaauaaaugaaauucaaaaugaaauaaauauuguguugugcagcauuaaaaaaucaauaaaaauuaaaaaugagcaagaucuaaaaaaaaaaaaaaaaaaaaaaaaaaaaaaaaaaaaaaaaaaaaaaaaaaaaaaaaaaaaaaaaugcaucccccccccccccccccccccccccccccccaaaggcucuuuucagagccaccagaauu

SEQ ID NO: 19750 - RNA, 2139 nt, Artificial Sequence
  mRNA product Design g-3 comprising derived and/or modified sequence from HRSV(Memphis-37)__AIY60640.1__F-del_DSCav1_mut8 (opt2)
gggagaguccgcucagccagguugcagaagcggcuuagcguguguccuaaucuucucucugcguguagguaggccugugccgcaaacaagcuuaccauggagcuccccauccucaagaccaacgccaucaccaccauccucgccgccgucacccucugcuucgccuccucccagaacaucaccgaggaguucuaccaguccaccugcuccgccgucuccaagggcuaccucggcgcccuccgcaccggcugguacaccuccgucaucaccaucgagcucuccaacaucaaggagaucaagugcaacggcaccgacgccaaggucaagcucaucaagcaggagcucgacaaguacaagaacgccgucaccgaccuccagcuccucaugcaguccacccccgccgccggcuccggcuccgccaucgccuccggcaucgccgucugcaagguccuccaccucgagggcgaggucaacaagaucaagaacgcccuccucuccaccaacaaggccgucgucucccucuccggcugcggcgucuccguccucaccuucaagguccucgaccucaagaacuacaucgacaagcagcuccuccccauccucaacaagcaguccugcuccauccccaacaucgagaccgucaucgaguuccagcagaagaacaaccgccuccucgagaucacccgcgaguucuccgucaacgccggcgucaccacccccgucuccaccuacaugcucaccaacuccgagcuccucucccucaucaacgacaugcccaucaccaacgaccagaagaagcucauguccaacaacguccagaucguccgccagcaguccuacuccaucaugugcaucaucaaggaggagguccucgccuacgucguccagcucccccucuacggcgucaucgacacccccugcuggaagcuccacaccuccccccucugcaccaccaacaccaaggagggcuccaacaucugccucacccgcaccgaccgcggcugguacugcgacaacgccggcuccgucuccuucuucccccaggccgagaccugcaagguccaguccaaccgcgucuucugcgacaccaugaacucccucacccuccccuccgaggucaaccucugcaacaucgacaucuucaaccccaaguacgacugcaagaucaugaccuccaagaccgacgucuccuccuccgucaucaccucccucggcgccaucgucuccugcuacggcaagaccaagugcaccgccuccaacaagugccgcggcaucaucaagaccuucuccaacggcugcgacuacgucuccaacaagggcgucgacaccgucuccgucggcaacacccucuacuacgucaacaagcaggagggccagucccucuacgucaagggcgagcccaucaucaacuucuacgacccccucgucuuccccuccgacgaguucgacgccuccaucucccaggucaacgagaagaucaaccagucccucgccuucauccgcaaguccgacgagcuccuccacaacgucaacgucggcaaguccaccaccaacaucaugaucaccaccaucaucaucgucaucaucgucauccuccuccuccucaucgccgucggccucuuccucuacugcaaggcccgcugaggacuagugaagggaacacccaaauuuaauucagccuuaagcacaauuaauuaagagugaaacguaauuguacaagcaguuggucacccaccauagggcaugaucaacaccgcaaccuuuccuuuuucccccagugauucugaaaaaccccucuucccuucagcuugcuuagauguuccaaauuuaguaagcuuaaggcggccuacagaagaaaaagaaaaaaaaggccacaaaaguucccucucacuuucaguaaauaaaauaaaagcagcaacagaaauaaagaaauaaaugaaauucaaaaugaaauaaauauuguguugugcagcauuaaaaaaucaauaaaaauuaaaaaugagcaagaucuaaaaaaaaaaaaaaaaaaaaaaaaaaaaaaaaaaaaaaaaaaaaaaaaaaaaaaaaaaaaaaaaugcaucccccccccccccccccccccccccccccccaaaggcucuuuucagagccaccagaauu

SEQ ID NO: 19751 - RNA, 2139 nt, Artificial Sequence
  mRNA product Design g-3 comprising derived and/or modified sequence from HRSV(Memphis-37)__AIY60640.1__F-del_DSCav1_mut8 (opt3)
gggagaguccgcucagccagguugcagaagcggcuuagcguguguccuaaucuucucucugcguguagguaggccugugccgcaaacaagcuuaccauggagcugcccauccucaagaccaacgccauuacaacuauacuugcugcagugacgcugugcuucgccagcucccagaauaucaccgaagaguuuuaccaaucuacauguucagcggucaguaaaggcuauuugggggcuuuaagaacuggaugguacaccagcguuauuacaaucgaacuguccaacauuaaggagaucaaaugcaaugguaccgacgccaaggugaaacuaauaaagcaggaacucgauaaguauaaaaacgcaguaacugaccugcagcuucugaugcagucuacuccugccgcuggcucggggucagcaaucgccagcggaauugcuguguguaaggucuugcaccucgagggcgaggugaauaaaaucaagaacgcccugcugaguaccaauaaagcgguugugucccucucugguugcggggucagcguguuaacguucaagguacuggaucuuaagaacuacauugacaaacaauugcugccaauccuaaauaagcaguccuguucaauaccgaacauugaaacuguuaucgaguuucagcagaaaaauaacaggcuccuggaaauuacccgggaguucagugugaaugcaggagucacaacucccgugagcaccuauaugcuuacaaacucugagcuguugucccucaucaaugauaugccuaucaccaacgaccaaaagaaacugaugucaaacaaugugcagauuguccgccagcagagcuacaguauaaugugcaucauuaaggaagagguuuuagccuaugugguacaacugccacucuacggcgugaucgauacgcccuguuggaaacuucauacuucuccucugugcacaaccaacacuaaggaaggcuccaauauauguuugacacgaaccgaccgugggugguacugcgauaacgcuggaagcgucucguuuuucccacaggccgagacguguaaggugcagucuaauagaguuuucugcgacaccaugaacucccuaacacugcccucagaagugaaucucugcaacauugauaucuucaauccuaaauaugacuguaagaucaugacaaguaaaaccgaugucagcuccucugugauuacaagccugggugcaaucguaucaugcuacggcaagacuaaauguaccgcuaguaacaagugcagggggauuauaaagacauuuuccaauggaugugacuauguuagcaacaaaggcguggacaccgucucuguggguaauacucuuuacuaugucaacaagcaagaggggcagucacuguacgugaaaggagagccaaucauuaauuucuaugauccguugguuuuucccagugacgaauuugaugccagcaucucccaggugaacgagaagaucaaccagucucucgcguuuauucggaaaucggacgaacuguuacacaauguaaacgucggcaagagcacgacaaauauaaugaucaccacuauuaucauugugaucauaguuauccugcuacuccugauugccgugggccuuuucuuguacugcaaggcacgcugaggacuagugaagggaacacccaaauuuaauucagccuuaagcacaauuaauuaagagugaaacguaauuguacaagcaguuggucacccaccauagggcaugaucaacaccgcaaccuuuccuuuuucccccagugauucugaaaaaccccucuucccuucagcuugcuuagauguuccaaauuuaguaagcuuaaggcggccuacagaagaaaaagaaaaaaaaggccacaaaaguucccucucacuuucaguaaauaaaauaaaagcagcaacagaaauaaagaaauaaaugaaauucaaaaugaaauaaauauuguguugugcagcauuaaaaaaucaauaaaaauuaaaaaugagcaagaucuaaaaaaaaaaaaaaaaaaaaaaaaaaaaaaaaaaaaaaaaaaaaaaaaaaaaaaaaaaaaaaaaugcaucccccccccccccccccccccccccccccccaaaggcucuuuucagagccaccagaauu

SEQ ID NO: 19752 - RNA, 2139 nt, Artificial Sequence
  mRNA product Design g-3 comprising derived and/or modified sequence from HRSV(Memphis-37)__AIY60640.1__F-del_DSCav1_mut8 (opt4)
gggagaguccgcucagccagguugcagaagcggcuuagcguguguccuaaucuucucucugcguguagguaggccugugccgcaaacaagcuuaccauggagcugcccauccugaagaccaacgccaucaccaccauccuggccgccgugacccugugcuucgccagcagccagaacaucaccgaggaguucuaccagagcaccugcagcgccgugagcaagggcuaccugggcgcccugagaaccggcugguacaccagcgugaucaccaucgagcugagcaacaucaaggagaucaagugcaacggcaccgacgccaaggugaagcugaucaagcaggagcuggacaaguacaagaacgccgugaccgaccugcagcugcugaugcagagcacccccgccgccggcagcggcagcgccaucgccagcggcaucgccgugugcaaggugcugcaccuggagggcgaggugaacaagaucaagaacgcccugcugagcaccaacaaggccguggugagccugagcggcugcggcgugagcgugcugaccuucaaggugcuggaccugaagaacuacaucgacaagcagcugcugcccauccugaacaagcagagcugcagcauccccaacaucgagaccgugaucgaguuccagcagaagaacaacagacugcuggagaucaccagagaguucagcgugaacgccggcgugaccacccccgugagcaccuacaugcugaccaacagcgagcugcugagccugaucaacgacaugcccaucaccaacgaccagaagaagcugaugagcaacaacgugcagaucgugagacagcagagcuacagcaucaugugcaucaucaaggaggaggugcuggccuacguggugcagcugccccuguacggcgugaucgacacccccugcuggaagcugcacaccagcccccugugcaccaccaacaccaaggagggcagcaacaucugccugaccagaaccgacagaggcugguacugcgacaacgccggcagcgugagcuucuucccccaggccgagaccugcaaggugcagagcaacagaguguucugcgacaccaugaacagccugacccugcccagcgaggugaaccugugcaacaucgacaucuucaaccccaaguacgacugcaagaucaugaccagcaagaccgacgugagcagcagcgugaucaccagccugggcgccaucgugagcugcuacggcaagaccaagugcaccgccagcaacaagugcagaggcaucaucaagaccuucagcaacggcugcgacuacgugagcaacaagggcguggacaccgugagcgugggcaacacccuguacuacgugaacaagcaggagggccagagccuguacgugaagggcgagcccaucaucaacuucuacgacccccugguguuccccagcgacgaguucgacgccagcaucagccaggugaacgagaagaucaaccagagccuggccuucaucagaaagagcgacgagcugcugcacaacgugaacgugggcaagagcaccaccaacaucaugaucaccaccaucaucaucgugaucaucgugauccugcugcugcugaucgccgugggccuguuccuguacugcaaggccagaugaggacuagugaagggaacacccaaauuuaauucagccuuaagcacaauuaauuaagagugaaacguaauuguacaagcaguuggucacccaccauagggcaugaucaacaccgcaaccuuuccuuuuucccccagugauucugaaaaaccccucuucccuucagcuugcuuagauguuccaaauuuaguaagcuuaaggcggccuacagaagaaaaagaaaaaaaaggccacaaaaguucccucucacuuucaguaaauaaaauaaaagcagcaacagaaauaaagaaauaaaugaaauucaaaaugaaauaaauauuguguugugcagcauuaaaaaaucaauaaaaauuaaaaaugagcaagaucuaaaaaaaaaaaaaaaaaaaaaaaaaaaaaaaaaaaaaaaaaaaaaaaaaaaaaaaaaaaaaaaaugcaucccccccccccccccccccccccccccccccaaaggcucuuuucagagccaccagaauu

SEQ ID NO: 19753 - RNA, 2139 nt, Artificial Sequence
  mRNA product Design g-3 comprising derived and/or modified sequence from HRSV(Memphis-37)__AIY60640.1__F-del_DSCav1_mut8 (opt5)
gggagaguccgcucagccagguugcagaagcggcuuagcguguguccuaaucuucucucugcguguagguaggccugugccgcaaacaagcuuaccauggagcugcccauccucaagaccaacgccauuacaacgauccuggcugccgugacccuuugcuucgcgagcucccagaauauuacagaagaguuuuaccaaucuaccuguagcgcugucuccaaaggcuaucugggggcccucagaacaggaugguacaccucuguuaucacaauugaacugagcaacaucaaggagaucaaaugcaauggcaccgacgccaaggugaaacuuauuaagcaggaacuggauaaguauaaaaacgcugugacggaccuccagcugcugaugcaguccaccccugccgcugggucuggaagcgccaucgcguccggcauugccgucuguaaggugcuccaccuggagggggagguuaauaaaaucaagaacgcccuucugagcacaaauaaagcuguggucucucucuccggaugcggcgugagcguucugaccuucaaggugcuugaucugaagaacuacauugacaaacaacuccugccgauccugaauaagcagucuuguuccauucccaacaucgaaacagucaucgaguuucagcagaaaaauaaccggcuccuggaaauuacccgcgaguucagcgugaaugcuggcgugacgacaccugucucuaccuauaugcuuacaaacuccgagcugcucagccugaucaaugauaugcccauuaccaacgaccaaaagaaacuuauguccaacaauguucagaucgugagacagcagucuuacagcauuaugugcaucaucaaggaagaggugcuggccuaugucgugcaacucccucuguacgggguuauugauacccccuguuggaaacugcauacauccccucucugcacgaccaacacaaaggaaggaagcaauaucugucugacccggacagaccgcggcugguacugcgauaacgcggggucuguguccuuuuucccgcaggccgagaccuguaagguccagagcaauagaguguuuugcgacacgaugaacucucuuacacugcccagcgaaguuaaucucugcaacauugauaucuucaauccuaaauaugacuguaagauuaugaccuccaaaaccgaugugucuagcuccgucaucacaagccugggagcuaucgugucuugcuacggcaagaccaaauguacagccuccaacaagugccgggggauuaucaagacguuuagcaauggaugugacuaugucucuaacaaaggcguggacaccguuuccgugggcaauacacuuuacuaugucaacaagcaagaggggcagagccuguacgugaaaggagagcccauuaucaauuucuaugauccucucguuuuucccuccgacgaguucgaugcuucuauuagccaggugaacgaaaagaucaaccagucccuggccuuuauucgcaaaucugacgaacugcuccacaaugucaacgugggcaagagcaccacaaauaucaugaucaccacgauuaucauugugaucauuguuauccugcuucugcucaucgccgucgggcuguuccuguacugcaaggcuagaugaggacuagugaagggaacacccaaauuuaauucagccuuaagcacaauuaauuaagagugaaacguaauuguacaagcaguuggucacccaccauagggcaugaucaacaccgcaaccuuuccuuuuucccccagugauucugaaaaaccccucuucccuucagcuugcuuagauguuccaaauuuaguaagcuuaaggcggccuacagaagaaaaagaaaaaaaaggccacaaaaguucccucucacuuucaguaaauaaaauaaaagcagcaacagaaauaaagaaauaaaugaaauucaaaaugaaauaaauauuguguugugcagcauuaaaaaaucaauaaaaauuaaaaaugagcaagaucuaaaaaaaaaaaaaaaaaaaaaaaaaaaaaaaaaaaaaaaaaaaaaaaaaaaaaaaaaaaaaaaaugcaucccccccccccccccccccccccccccccccaaaggcucuuuucagagccaccagaauu

SEQ ID NO: 19754 - RNA, 2139 nt, Artificial Sequence
  mRNA product Design g-3 comprising derived and/or modified sequence from HRSV(Memphis-37)__AIY60640.1__F-del_DSCav1_mut8 (opt6)
gggagaguccgcucagccagguugcagaagcggcuuagcguguguccuaaucuucucucugcguguagguaggccugugccgcaaacaagcuuaccauggaacuacccauacuaaaaacaaacgcaauuacaacaauacuugccgcaguaaccuuaugcuuugccucaucccaaaacauaacagaagaauuuuaucaaucaacaugcuccgcaguaucaaaaggauaccuaggcgcucuaagaacaggaugguacacauccguaaucacaauagaacuauccaauauaaaagaaauaaaauguaauggaacagaugcaaaaguuaaauuaauaaaacaagaacuagacaaauacaaaaacgcaguuaccgaucuccaacuauuaaugcaaucaacaccagcugcaggaaguggaagcgccauagcaagcggaauagcagucugcaaaguauuacaucuugaaggcgaaguaaacaaaaucaaaaaugcccuccucucaacaaacaaagcuguaguaucccuaucaggaugcgguguaucuguucuuacauuuaaaguacucgaucuaaaaaacuacaucgauaaacaguuacuuccaauacucaacaaacaaucauguagcauaccaaacauagaaacaguaauagaauuucaacaaaaaaacaaucgacuacucgaaauaacuagagaauuuucuguaaacgcuggaguaaccacaccagugucuaccuauaugcuuacaaauagcgaacuccuaucacuaaucaaugacaugccaauaacaaaugaccagaaaaaacucaugucaaauaacguacaaauaguacgacaacaaagcuacuccauaaugugcauaaucaaagaagaaguauuagccuacguuguucaacuaccauuauauggaguuauagacacuccaugcuggaaauuacauacaagcccacucuguacaacaaacacaaaagaaggcucaaacauaugcuuaacaagaacagauagaggaugguacugcgauaacgcaggcucagucucauuuuuuccacaagccgaaaccugcaaaguacaaucaaauagaguuuuuugcgacacaaugaacucacucacucuaccaagugaaguaaaucucuguaauaucgacauauucaacccaaaauaugacugcaaaauaaugacaucuaaaaccgauguauccucaagcguaaucacaucauuaggagcuauaguuuccugcuacgguaaaacaaaaugcacagcauccaacaaaugucgcgguaucaucaaaacauucuccaacggaugugauuacguaucaaacaaaggugucgacaccguaagcguaggcaacacuuuauacuauguaaacaaacaagaaggacaaagucuauauguaaaaggagaaccaauaauaaacuucuaugacccccuaguauucccuuccgacgaauuugaugcaagcauuucacaaguuaacgaaaaaaucaaucaaucccuugcuuucauaagaaaaucagacgaauuacuacacaacguaaacguaggaaaaagcacaacaaauaucaugauuacaacaauaauaauuguaauaauaguaauacuccucuuacuuauagcagucggcuuauuccuuuacugcaaagcaagauaaggacuagugaagggaacacccaaauuuaauucagccuuaagcacaauuaauuaagagugaaacguaauuguacaagcaguuggucacccaccauagggcaugaucaacaccgcaaccuuuccuuuuucccccagugauucugaaaaaccccucuucccuucagcuugcuuagauguuccaaauuuaguaagcuuaaggcggccuacagaagaaaaagaaaaaaaaggccacaaaaguucccucucacuuucaguaaauaaaauaaaagcagcaacagaaauaaagaaauaaaugaaauucaaaaugaaauaaauauuguguugugcagcauuaaaaaaucaauaaaaauuaaaaaugagcaagaucuaaaaaaaaaaaaaaaaaaaaaaaaaaaaaaaaaaaaaaaaaaaaaaaaaaaaaaaaaaaaaaaaugcaucccccccccccccccccccccccccccccccaaaggcucuuuucagagccaccagaauu

SEQ ID NO: 19755 - RNA, 2139 nt, Artificial Sequence
  mRNA product Design g-3 comprising derived and/or modified sequence from HRSV(Memphis-37)__AIY60640.1__F-del_DSCav1_mut8 (opt11)
gggagaguccgcucagccagguugcagaagcggcuuagcguguguccuaaucuucucucugcguguagguaggccugugccgcaaacaagcuuaccauggaacuccccauccuaaaaaccaacgcaaucaccaccauccucgccgccguaacacucugcuuugcaagcucccaaaacaucaccgaagaauuuuaccaaucuaccugcagcgccguaucuaaaggauaccuaggagcccucagaaccgguugguacaccucugucaucacaauagaacucuccaacaucaaagaaaucaaaugcaacggcaccgacgccaaagucaaacucaucaaacaagaacucgacaaauauaaaaacgccguaaccgaccuccaacuccucaugcaauccacccccgccgccggcaguggcuccgcuaucgccuccggaaucgccguuugcaaaguccugcaccuagaaggcgaagucaacaaaaucaaaaacgcccugcucucaaccaacaaagcugucguaagccucuccggcugcggagucuccguccuuaccuucaaaguacucgaccuuaaaaacuacaucgacaaacaacuucuccccauacucaauaaacaauccugcuccauacccaacaucgaaacagucaucgaguuccaacagaaaaauaaccgccuccucgaaauaacccgcgaguucuccgucaacgcaggcgucaccaccccagucuccaccuacaugcugacaaacuccgaacuccuaucccucaucaacgacaugcccaucaccaacgaccaaaagaaacucaugagcaauaacguccaaaucguacgacaacaauccuacagcaucauguguaucaucaaagaagaaguacucgccuacgucguccaacucccacuauacggcgucaucgacacaccaugcuggaaacuucacaccuccccacucugcaccacaaacacaaaagaaggcuccaacaucugccuuacccgaaccgaccgcgggugguacugcgacaacgccggaucagucucguucuuuccccaagccgaaaccugcaaaguacaaucaaaucgcgucuucugcgacaccaugaacuccuuaacacuaccauccgaaguaaaccucugcaacauagacaucuucaacccaaaauacgacugcaaaaucaugaccuccaaaaccgacguauccuccuccguaaucaccagccucggcgcaauagucucaugcuacggcaaaaccaaaugcaccgccuccaacaaaugccgcggcaucauaaaaacuuucucuaacggaugcgacuacgucagcaacaaaggcgucgacaccguauccguagguaauacacuuuacuacgucaauaaacaagaaggccaaucccucuacgucaaaggagaacccaucauaaacuucuacgacccccucgucuuccccuccgacgaguucgacgccuccaucagccaggucaacgaaaagaucaaccaaucacucgccuucauccgcaaaagcgacgaacuccuccacaacguaaacgucggcaaauccacaaccaacauaaugaucaccacuaucaucaucgugauaaucgucauuuuacuucuccucaucgccguaggccucuuccuauacugcaaagcccgcuaaggacuagugaagggaacacccaaauuuaauucagccuuaagcacaauuaauuaagagugaaacguaauuguacaagcaguuggucacccaccauagggcaugaucaacaccgcaaccuuuccuuuuucccccagugauucugaaaaaccccucuucccuucagcuugcuuagauguuccaaauuuaguaagcuuaaggcggccuacagaagaaaaagaaaaaaaaggccacaaaaguucccucucacuuucaguaaauaaaauaaaagcagcaacagaaauaaagaaauaaaugaaauucaaaaugaaauaaauauuguguugugcagcauuaaaaaaucaauaaaaauuaaaaaugagcaagaucuaaaaaaaaaaaaaaaaaaaaaaaaaaaaaaaaaaaaaaaaaaaaaaaaaaaaaaaaaaaaaaaaugcaucccccccccccccccccccccccccccccccaaaggcucuuuucagagccaccagaauu

SEQ ID NO: 19756 - RNA, 1934 nt, Artificial Sequence
  mRNA product Design g-4 comprising derived and/or modified sequence from HRSV(Memphis-37)__AIY60640.1__F-del_DSCav1_mut8 (opt1)
gggagacuccugucgggcggaaguaggaggaguagaguuuaaaaacaguacucuuuuuccgguucgggacguaguugaagcaacgacaagccggauaaccgcucuugagacaggaagcuuaccauggagcugcccauccucaagaccaacgccaucaccacgauccuggccgcggugacccugugcuucgccagcucccagaacaucaccgaggaguucuaccagagcacgugcuccgccgucagcaagggcuaccucggcgcccugcgcaccgggugguacaccagcgugaucaccaucgagcuguccaacaucaaggagaucaagugcaacggcaccgacgccaaggugaagcucaucaagcaggagcuggacaaguacaagaacgcggucacggaccugcagcuccugaugcagagcaccccggccgccggcuccgggagcgcgaucgccuccggcaucgccgucugcaaggugcugcaccucgagggcgaggugaacaagaucaagaacgcccugcuguccaccaacaaggccgucgugagccucuccggcugcggggugagcguccugaccuucaaggugcuggaccucaagaacuacaucgacaagcagcugcugcccauccugaacaagcagagcugcuccauccccaacaucgagaccgucaucgaguuccagcagaagaacaaccgccuccuggagaucacgcgggaguucagcgugaacgcgggcgugaccacccccgucuccaccuacaugcugacgaacagcgagcuccugucccugaucaacgacaugccgaucaccaacgaccagaagaagcucaugagcaacaacgugcagaucgugcgccagcaguccuacagcaucaugugcaucaucaaggaggagguccuggccuacguggugcagcugccccucuacggggucaucgacacccccugcuggaagcugcacaccagcccccugugcacgaccaacaccaaggagggcuccaacaucugccucacccggacggaccgcgggugguacugcgacaacgccggcagcguguccuucuucccgcaggccgagaccugcaagguccagagcaaccggguguucugcgacaccaugaacucccugacccugcccagcgaggugaaccucugcaacaucgacaucuucaaccccaaguacgacugcaagaucaugacguccaagaccgacgucagcuccagcgugaucaccucccugggcgccaucgugagcugcuacgggaagaccaagugcacggcgagcaacaagugccgcggcaucaucaagaccuucuccaacgggugcgacuacgucagcaacaagggcguggacaccguguccgucggcaacacccuguacuacgugaacaagcaggagggccagagccucuacgugaagggggagcccaucaucaacuucuacgacccgcuggucuuccccuccgacgaguucgacgccagcaucucccaggugaacgagaagaucaaccagagccuggccuucauccggaaguccgacgagcuccugcacaacgugaacgucggcaagagcaccacgaacaucaugaucaccaccaucaucaucgugaucaucgugauccugcugcuccugaucgccgucgggcuguuccucuacugcaaggcccgcugaggacuaguaauaaggaaacuguaugaaugucugugggcaggaagugaagagauccuucuguaaagguuuuuggaauuaugucugcugaauaauaaacuuuuuugaaauaauaaaucugguagaaaaaugagaucuaaaaaaaaaaaaaaaaaaaaaaaaaaaaaaaaaaaaaaaaaaaaaaaaaaaaaaaaaaaaaaaaugcaucccccccccccccccccccccccccccccccaaaggcucuuuucagagccaccagaauu

SEQ ID NO: 19757 - RNA, 1934 nt, Artificial Sequence
  mRNA product Design g-4 comprising derived and/or modified sequence from HRSV(Memphis-37)__AIY60640.1__F-del_DSCav1_mut8 (opt1)
gggagacuccugucgggcggaaguaggaggaguagaguuuaaaaacaguacucuuuuuccgguucgggacguaguugaagcaacgacaagccggauaaccgcucuugagacaggaagcuuaccauggagcugcccauccucaagaccaacgccaucaccacgauccuggccgcggugacccugugcuucgccagcucccagaacaucaccgaggaguucuaccagagcacgugcuccgccgucagcaagggcuaccucggggcccugcgcaccggcugguacaccuccgugaucaccaucgagcugagcaacaucaaggagaucaagugcaacgggaccgacgccaaggugaagcucaucaagcaggagcuggacaaguacaagaacgcggucacggaccugcagcuccugaugcaguccaccccggccgccggcagcggguccgccaucgcgagcggcaucgccgugugcaaggugcugcaccucgagggcgaggucaacaagaucaagaacgcccugcuguccaccaacaaggccguggugagccucuccgggugcggcgucagcgugcugaccuucaaggugcuggaccucaagaacuacaucgacaagcagcugcugcccauccucaacaagcaguccugcagcauccccaacaucgagacggucaucgaguuccagcagaagaacaaccggcugcuggagaucacccgcgaguucuccgugaacgccggggugaccacccccgucagcacguacaugcucaccaacuccgagcugcugagccucaucaacgacaugccgaucaccaacgaccagaagaagcugaugagcaacaacgugcagaucgugcggcagcaguccuacagcaucaugugcaucaucaaggaggagguccuggcguacguggugcagcucccccuguacggcgucaucgacacccccugcuggaagcugcacacgagcccccucugcaccaccaacaccaaggagggguccaacaucugccugacgcgcaccgaccggggcugguacugcgacaacgccggcuccgugagcuucuucccgcaggccgagaccugcaaggugcaguccaaccgcgucuucugcgacaccaugaacagccugacgcuccccuccgaggugaaccugugcaacaucgacaucuucaaccccaaguacgacugcaagaucaugaccagcaagaccgacgucuccagcuccgugaucaccagccugggggccaucguguccugcuacggcaagacgaagugcaccgccagcaacaagugccgggggaucaucaagaccuucuccaacggcugcgacuacgucagcaacaagggcguggacaccguguccgucgggaacacgcucuacuacgugaacaagcaggagggccagagccuguacgugaagggggagcccaucaucaacuucuacgacccgcuggucuuccccagcgacgaguucgacgcguccaucagccaggugaacgagaagaucaaccagucccucgccuucauccgcaagagcgacgagcugcugcacaacgugaacgucggcaaguccaccaccaacaucaugaucaccaccaucaucaucgugaucaucgugauccuccugcugcucaucgccgucgggcuguuccuguacugcaaggcccggugaggacuaguaauaaggaaacuguaugaaugucugugggcaggaagugaagagauccuucuguaaagguuuuuggaauuaugucugcugaauaauaaacuuuuuugaaauaauaaaucugguagaaaaaugagaucuaaaaaaaaaaaaaaaaaaaaaaaaaaaaaaaaaaaaaaaaaaaaaaaaaaaaaaaaaaaaaaaaugcaucccccccccccccccccccccccccccccccaaaggcucuuuucagagccaccagaauu

SEQ ID NO: 19758 - RNA, 1934 nt, Artificial Sequence
  mRNA product Design g-4 comprising derived and/or modified sequence from HRSV(Memphis-37)__AIY60640.1__F-del_DSCav1_mut8 (opt2)
gggagacuccugucgggcggaaguaggaggaguagaguuuaaaaacaguacucuuuuuccgguucgggacguaguugaagcaacgacaagccggauaaccgcucuugagacaggaagcuuaccauggagcuccccauccucaagaccaacgccaucaccaccauccucgccgccgucacccucugcuucgccuccucccagaacaucaccgaggaguucuaccaguccaccugcuccgccgucuccaagggcuaccucggcgcccuccgcaccggcugguacaccuccgucaucaccaucgagcucuccaacaucaaggagaucaagugcaacggcaccgacgccaaggucaagcucaucaagcaggagcucgacaaguacaagaacgccgucaccgaccuccagcuccucaugcaguccacccccgccgccggcuccggcuccgccaucgccuccggcaucgccgucugcaagguccuccaccucgagggcgaggucaacaagaucaagaacgcccuccucuccaccaacaaggccgucgucucccucuccggcugcggcgucuccguccucaccuucaagguccucgaccucaagaacuacaucgacaagcagcuccuccccauccucaacaagcaguccugcuccauccccaacaucgagaccgucaucgaguuccagcagaagaacaaccgccuccucgagaucacccgcgaguucuccgucaacgccggcgucaccacccccgucuccaccuacaugcucaccaacuccgagcuccucucccucaucaacgacaugcccaucaccaacgaccagaagaagcucauguccaacaacguccagaucguccgccagcaguccuacuccaucaugugcaucaucaaggaggagguccucgccuacgucguccagcucccccucuacggcgucaucgacacccccugcuggaagcuccacaccuccccccucugcaccaccaacaccaaggagggcuccaacaucugccucacccgcaccgaccgcggcugguacugcgacaacgccggcuccgucuccuucuucccccaggccgagaccugcaagguccaguccaaccgcgucuucugcgacaccaugaacucccucacccuccccuccgaggucaaccucugcaacaucgacaucuucaaccccaaguacgacugcaagaucaugaccuccaagaccgacgucuccuccuccgucaucaccucccucggcgccaucgucuccugcuacggcaagaccaagugcaccgccuccaacaagugccgcggcaucaucaagaccuucuccaacggcugcgacuacgucuccaacaagggcgucgacaccgucuccgucggcaacacccucuacuacgucaacaagcaggagggccagucccucuacgucaagggcgagcccaucaucaacuucuacgacccccucgucuuccccuccgacgaguucgacgccuccaucucccaggucaacgagaagaucaaccagucccucgccuucauccgcaaguccgacgagcuccuccacaacgucaacgucggcaaguccaccaccaacaucaugaucaccaccaucaucaucgucaucaucgucauccuccuccuccucaucgccgucggccucuuccucuacugcaaggcccgcugaggacuaguaauaaggaaacuguaugaaugucugugggcaggaagugaagagauccuucuguaaagguuuuuggaauuaugucugcugaauaauaaacuuuuuugaaauaauaaaucugguagaaaaaugagaucuaaaaaaaaaaaaaaaaaaaaaaaaaaaaaaaaaaaaaaaaaaaaaaaaaaaaaaaaaaaaaaaaugcaucccccccccccccccccccccccccccccccaaaggcucuuuucagagccaccagaauu

SEQ ID NO: 19759 - RNA, 1934 nt, Artificial Sequence
  mRNA product Design g-4 comprising derived and/or modified sequence from HRSV(Memphis-37)__AIY60640.1__F-del_DSCav1_mut8 (opt3)
gggagacuccugucgggcggaaguaggaggaguagaguuuaaaaacaguacucuuuuuccgguucgggacguaguugaagcaacgacaagccggauaaccgcucuugagacaggaagcuuaccauggagcugcccauccucaagaccaacgccauuacaacuauacuugcugcagugacgcugugcuucgccagcucccagaauaucaccgaagaguuuuaccaaucuacauguucagcggucaguaaaggcuauuugggggcuuuaagaacuggaugguacaccagcguuauuacaaucgaacuguccaacauuaaggagaucaaaugcaaugguaccgacgccaaggugaaacuaauaaagcaggaacucgauaaguauaaaaacgcaguaacugaccugcagcuucugaugcagucuacuccugccgcuggcucggggucagcaaucgccagcggaauugcuguguguaaggucuugcaccucgagggcgaggugaauaaaaucaagaacgcccugcugaguaccaauaaagcgguugugucccucucugguugcggggucagcguguuaacguucaagguacuggaucuuaagaacuacauugacaaacaauugcugccaauccuaaauaagcaguccuguucaauaccgaacauugaaacuguuaucgaguuucagcagaaaaauaacaggcuccuggaaauuacccgggaguucagugugaaugcaggagucacaacucccgugagcaccuauaugcuuacaaacucugagcuguugucccucaucaaugauaugccuaucaccaacgaccaaaagaaacugaugucaaacaaugugcagauuguccgccagcagagcuacaguauaaugugcaucauuaaggaagagguuuuagccuaugugguacaacugccacucuacggcgugaucgauacgcccuguuggaaacuucauacuucuccucugugcacaaccaacacuaaggaaggcuccaauauauguuugacacgaaccgaccgugggugguacugcgauaacgcuggaagcgucucguuuuucccacaggccgagacguguaaggugcagucuaauagaguuuucugcgacaccaugaacucccuaacacugcccucagaagugaaucucugcaacauugauaucuucaauccuaaauaugacuguaagaucaugacaaguaaaaccgaugucagcuccucugugauuacaagccugggugcaaucguaucaugcuacggcaagacuaaauguaccgcuaguaacaagugcagggggauuauaaagacauuuuccaauggaugugacuauguuagcaacaaaggcguggacaccgucucuguggguaauacucuuuacuaugucaacaagcaagaggggcagucacuguacgugaaaggagagccaaucauuaauuucuaugauccguugguuuuucccagugacgaauuugaugccagcaucucccaggugaacgagaagaucaaccagucucucgcguuuauucggaaaucggacgaacuguuacacaauguaaacgucggcaagagcacgacaaauauaaugaucaccacuauuaucauugugaucauaguuauccugcuacuccugauugccgugggccuuuucuuguacugcaaggcacgcugaggacuaguaauaaggaaacuguaugaaugucugugggcaggaagugaagagauccuucuguaaagguuuuuggaauuaugucugcugaauaauaaacuuuuuugaaauaauaaaucugguagaaaaaugagaucuaaaaaaaaaaaaaaaaaaaaaaaaaaaaaaaaaaaaaaaaaaaaaaaaaaaaaaaaaaaaaaaaugcaucccccccccccccccccccccccccccccccaaaggcucuuuucagagccaccagaauu

SEQ ID NO: 19760 - RNA, 1934 nt, Artificial Sequence
  mRNA product Design g-4 comprising derived and/or modified sequence from HRSV(Memphis-37)__AIY60640.1__F-del_DSCav1_mut8 (opt4)
gggagacuccugucgggcggaaguaggaggaguagaguuuaaaaacaguacucuuuuuccgguucgggacguaguugaagcaacgacaagccggauaaccgcucuugagacaggaagcuuaccauggagcugcccauccugaagaccaacgccaucaccaccauccuggccgccgugacccugugcuucgccagcagccagaacaucaccgaggaguucuaccagagcaccugcagcgccgugagcaagggcuaccugggcgcccugagaaccggcugguacaccagcgugaucaccaucgagcugagcaacaucaaggagaucaagugcaacggcaccgacgccaaggugaagcugaucaagcaggagcuggacaaguacaagaacgccgugaccgaccugcagcugcugaugcagagcacccccgccgccggcagcggcagcgccaucgccagcggcaucgccgugugcaaggugcugcaccuggagggcgaggugaacaagaucaagaacgcccugcugagcaccaacaaggccguggugagccugagcggcugcggcgugagcgugcugaccuucaaggugcuggaccugaagaacuacaucgacaagcagcugcugcccauccugaacaagcagagcugcagcauccccaacaucgagaccgugaucgaguuccagcagaagaacaacagacugcuggagaucaccagagaguucagcgugaacgccggcgugaccacccccgugagcaccuacaugcugaccaacagcgagcugcugagccugaucaacgacaugcccaucaccaacgaccagaagaagcugaugagcaacaacgugcagaucgugagacagcagagcuacagcaucaugugcaucaucaaggaggaggugcuggccuacguggugcagcugccccuguacggcgugaucgacacccccugcuggaagcugcacaccagcccccugugcaccaccaacaccaaggagggcagcaacaucugccugaccagaaccgacagaggcugguacugcgacaacgccggcagcgugagcuucuucccccaggccgagaccugcaaggugcagagcaacagaguguucugcgacaccaugaacagccugacccugcccagcgaggugaaccugugcaacaucgacaucuucaaccccaaguacgacugcaagaucaugaccagcaagaccgacgugagcagcagcgugaucaccagccugggcgccaucgugagcugcuacggcaagaccaagugcaccgccagcaacaagugcagaggcaucaucaagaccuucagcaacggcugcgacuacgugagcaacaagggcguggacaccgugagcgugggcaacacccuguacuacgugaacaagcaggagggccagagccuguacgugaagggcgagcccaucaucaacuucuacgacccccugguguuccccagcgacgaguucgacgccagcaucagccaggugaacgagaagaucaaccagagccuggccuucaucagaaagagcgacgagcugcugcacaacgugaacgugggcaagagcaccaccaacaucaugaucaccaccaucaucaucgugaucaucgugauccugcugcugcugaucgccgugggccuguuccuguacugcaaggccagaugaggacuaguaauaaggaaacuguaugaaugucugugggcaggaagugaagagauccuucuguaaagguuuuuggaauuaugucugcugaauaauaaacuuuuuugaaauaauaaaucugguagaaaaaugagaucuaaaaaaaaaaaaaaaaaaaaaaaaaaaaaaaaaaaaaaaaaaaaaaaaaaaaaaaaaaaaaaaaugcaucccccccccccccccccccccccccccccccaaaggcucuuuucagagccaccagaauu

SEQ ID NO: 19761 - RNA, 1934 nt, Artificial Sequence
  mRNA product Design g-4 comprising derived and/or modified sequence from HRSV(Memphis-37)__AIY60640.1__F-del_DSCav1_mut8 (opt5)
gggagacuccugucgggcggaaguaggaggaguagaguuuaaaaacaguacucuuuuuccgguucgggacguaguugaagcaacgacaagccggauaaccgcucuugagacaggaagcuuaccauggagcugcccauccucaagaccaacgccauuacaacgauccuggcugccgugacccuuugcuucgcgagcucccagaauauuacagaagaguuuuaccaaucuaccuguagcgcugucuccaaaggcuaucugggggcccucagaacaggaugguacaccucuguuaucacaauugaacugagcaacaucaaggagaucaaaugcaauggcaccgacgccaaggugaaacuuauuaagcaggaacuggauaaguauaaaaacgcugugacggaccuccagcugcugaugcaguccaccccugccgcugggucuggaagcgccaucgcguccggcauugccgucuguaaggugcuccaccuggagggggagguuaauaaaaucaagaacgcccuucugagcacaaauaaagcuguggucucucucuccggaugcggcgugagcguucugaccuucaaggugcuugaucugaagaacuacauugacaaacaacuccugccgauccugaauaagcagucuuguuccauucccaacaucgaaacagucaucgaguuucagcagaaaaauaaccggcuccuggaaauuacccgcgaguucagcgugaaugcuggcgugacgacaccugucucuaccuauaugcuuacaaacuccgagcugcucagccugaucaaugauaugcccauuaccaacgaccaaaagaaacuuauguccaacaauguucagaucgugagacagcagucuuacagcauuaugugcaucaucaaggaagaggugcuggccuaugucgugcaacucccucuguacgggguuauugauacccccuguuggaaacugcauacauccccucucugcacgaccaacacaaaggaaggaagcaauaucugucugacccggacagaccgcggcugguacugcgauaacgcggggucuguguccuuuuucccgcaggccgagaccuguaagguccagagcaauagaguguuuugcgacacgaugaacucucuuacacugcccagcgaaguuaaucucugcaacauugauaucuucaauccuaaauaugacuguaagauuaugaccuccaaaaccgaugugucuagcuccgucaucacaagccugggagcuaucgugucuugcuacggcaagaccaaauguacagccuccaacaagugccgggggauuaucaagacguuuagcaauggaugugacuaugucucuaacaaaggcguggacaccguuuccgugggcaauacacuuuacuaugucaacaagcaagaggggcagagccuguacgugaaaggagagcccauuaucaauuucuaugauccucucguuuuucccuccgacgaguucgaugcuucuauuagccaggugaacgaaaagaucaaccagucccuggccuuuauucgcaaaucugacgaacugcuccacaaugucaacgugggcaagagcaccacaaauaucaugaucaccacgauuaucauugugaucauuguuauccugcuucugcucaucgccgucgggcuguuccuguacugcaaggcuagaugaggacuaguaauaaggaaacuguaugaaugucugugggcaggaagugaagagauccuucuguaaagguuuuuggaauuaugucugcugaauaauaaacuuuuuugaaauaauaaaucugguagaaaaaugagaucuaaaaaaaaaaaaaaaaaaaaaaaaaaaaaaaaaaaaaaaaaaaaaaaaaaaaaaaaaaaaaaaaugcaucccccccccccccccccccccccccccccccaaaggcucuuuucagagccaccagaauu

SEQ ID NO: 19762 - RNA, 1934 nt, Artificial Sequence
  mRNA product Design g-4 comprising derived and/or modified sequence from HRSV(Memphis-37)__AIY60640.1__F-del_DSCav1_mut8 (opt6)
gggagacuccugucgggcggaaguaggaggaguagaguuuaaaaacaguacucuuuuuccgguucgggacguaguugaagcaacgacaagccggauaaccgcucuugagacaggaagcuuaccauggaacuacccauacuaaaaacaaacgcaauuacaacaauacuugccgcaguaaccuuaugcuuugccucaucccaaaacauaacagaagaauuuuaucaaucaacaugcuccgcaguaucaaaaggauaccuaggcgcucuaagaacaggaugguacacauccguaaucacaauagaacuauccaauauaaaagaaauaaaauguaauggaacagaugcaaaaguuaaauuaauaaaacaagaacuagacaaauacaaaaacgcaguuaccgaucuccaacuauuaaugcaaucaacaccagcugcaggaaguggaagcgccauagcaagcggaauagcagucugcaaaguauuacaucuugaaggcgaaguaaacaaaaucaaaaaugcccuccucucaacaaacaaagcuguaguaucccuaucaggaugcgguguaucuguucuuacauuuaaaguacucgaucuaaaaaacuacaucgauaaacaguuacuuccaauacucaacaaacaaucauguagcauaccaaacauagaaacaguaauagaauuucaacaaaaaaacaaucgacuacucgaaauaacuagagaauuuucuguaaacgcuggaguaaccacaccagugucuaccuauaugcuuacaaauagcgaacuccuaucacuaaucaaugacaugccaauaacaaaugaccagaaaaaacucaugucaaauaacguacaaauaguacgacaacaaagcuacuccauaaugugcauaaucaaagaagaaguauuagccuacguuguucaacuaccauuauauggaguuauagacacuccaugcuggaaauuacauacaagcccacucuguacaacaaacacaaaagaaggcucaaacauaugcuuaacaagaacagauagaggaugguacugcgauaacgcaggcucagucucauuuuuuccacaagccgaaaccugcaaaguacaaucaaauagaguuuuuugcgacacaaugaacucacucacucuaccaagugaaguaaaucucuguaauaucgacauauucaacccaaaauaugacugcaaaauaaugacaucuaaaaccgauguauccucaagcguaaucacaucauuaggagcuauaguuuccugcuacgguaaaacaaaaugcacagcauccaacaaaugucgcgguaucaucaaaacauucuccaacggaugugauuacguaucaaacaaaggugucgacaccguaagcguaggcaacacuuuauacuauguaaacaaacaagaaggacaaagucuauauguaaaaggagaaccaauaauaaacuucuaugacccccuaguauucccuuccgacgaauuugaugcaagcauuucacaaguuaacgaaaaaaucaaucaaucccuugcuuucauaagaaaaucagacgaauuacuacacaacguaaacguaggaaaaagcacaacaaauaucaugauuacaacaauaauaauuguaauaauaguaauacuccucuuacuuauagcagucggcuuauuccuuuacugcaaagcaagauaaggacuaguaauaaggaaacuguaugaaugucugugggcaggaagugaagagauccuucuguaaagguuuuuggaauuaugucugcugaauaauaaacuuuuuugaaauaauaaaucugguagaaaaaugagaucuaaaaaaaaaaaaaaaaaaaaaaaaaaaaaaaaaaaaaaaaaaaaaaaaaaaaaaaaaaaaaaaaugcaucccccccccccccccccccccccccccccccaaaggcucuuuucagagccaccagaauu

SEQ ID NO: 19763 - RNA, 1934 nt, Artificial Sequence
  mRNA product Design g-4 comprising derived and/or modified sequence from HRSV(Memphis-37)__AIY60640.1__F-del_DSCav1_mut8 (opt11)
gggagacuccugucgggcggaaguaggaggaguagaguuuaaaaacaguacucuuuuuccgguucgggacguaguugaagcaacgacaagccggauaaccgcucuugagacaggaagcuuaccauggaacuccccauccuaaaaaccaacgcaaucaccaccauccucgccgccguaacacucugcuuugcaagcucccaaaacaucaccgaagaauuuuaccaaucuaccugcagcgccguaucuaaaggauaccuaggagcccucagaaccgguugguacaccucugucaucacaauagaacucuccaacaucaaagaaaucaaaugcaacggcaccgacgccaaagucaaacucaucaaacaagaacucgacaaauauaaaaacgccguaaccgaccuccaacuccucaugcaauccacccccgccgccggcaguggcuccgcuaucgccuccggaaucgccguuugcaaaguccugcaccuagaaggcgaagucaacaaaaucaaaaacgcccugcucucaaccaacaaagcugucguaagccucuccggcugcggagucuccguccuuaccuucaaaguacucgaccuuaaaaacuacaucgacaaacaacuucuccccauacucaauaaacaauccugcuccauacccaacaucgaaacagucaucgaguuccaacagaaaaauaaccgccuccucgaaauaacccgcgaguucuccgucaacgcaggcgucaccaccccagucuccaccuacaugcugacaaacuccgaacuccuaucccucaucaacgacaugcccaucaccaacgaccaaaagaaacucaugagcaauaacguccaaaucguacgacaacaauccuacagcaucauguguaucaucaaagaagaaguacucgccuacgucguccaacucccacuauacggcgucaucgacacaccaugcuggaaacuucacaccuccccacucugcaccacaaacacaaaagaaggcuccaacaucugccuuacccgaaccgaccgcgggugguacugcgacaacgccggaucagucucguucuuuccccaagccgaaaccugcaaaguacaaucaaaucgcgucuucugcgacaccaugaacuccuuaacacuaccauccgaaguaaaccucugcaacauagacaucuucaacccaaaauacgacugcaaaaucaugaccuccaaaaccgacguauccuccuccguaaucaccagccucggcgcaauagucucaugcuacggcaaaaccaaaugcaccgccuccaacaaaugccgcggcaucauaaaaacuuucucuaacggaugcgacuacgucagcaacaaaggcgucgacaccguauccguagguaauacacuuuacuacgucaauaaacaagaaggccaaucccucuacgucaaaggagaacccaucauaaacuucuacgacccccucgucuuccccuccgacgaguucgacgccuccaucagccaggucaacgaaaagaucaaccaaucacucgccuucauccgcaaaagcgacgaacuccuccacaacguaaacgucggcaaauccacaaccaacauaaugaucaccacuaucaucaucgugauaaucgucauuuuacuucuccucaucgccguaggccucuuccuauacugcaaagcccgcuaaggacuaguaauaaggaaacuguaugaaugucugugggcaggaagugaagagauccuucuguaaagguuuuuggaauuaugucugcugaauaauaaacuuuuuugaaauaauaaaucugguagaaaaaugagaucuaaaaaaaaaaaaaaaaaaaaaaaaaaaaaaaaaaaaaaaaaaaaaaaaaaaaaaaaaaaaaaaaugcaucccccccccccccccccccccccccccccccaaaggcucuuuucagagccaccagaauu

SEQ ID NO: 19764 - RNA, 1910 nt, Artificial Sequence
  mRNA product Design g-5 comprising derived and/or modified sequence from HRSV(Memphis-37)__AIY60640.1__F-del_DSCav1_mut8 (opt1)
gggagacccgugacccggaaguuguacggcuacgcgacuuucccucccacaaacccucgcgcccuuccuuuccuacuugggcccggcagaaagcuuaccauggagcugcccauccucaagaccaacgccaucaccacgauccuggccgcggugacccugugcuucgccagcucccagaacaucaccgaggaguucuaccagagcacgugcuccgccgucagcaagggcuaccucggcgcccugcgcaccgggugguacaccagcgugaucaccaucgagcuguccaacaucaaggagaucaagugcaacggcaccgacgccaaggugaagcucaucaagcaggagcuggacaaguacaagaacgcggucacggaccugcagcuccugaugcagagcaccccggccgccggcuccgggagcgcgaucgccuccggcaucgccgucugcaaggugcugcaccucgagggcgaggugaacaagaucaagaacgcccugcuguccaccaacaaggccgucgugagccucuccggcugcggggugagcguccugaccuucaaggugcuggaccucaagaacuacaucgacaagcagcugcugcccauccugaacaagcagagcugcuccauccccaacaucgagaccgucaucgaguuccagcagaagaacaaccgccuccuggagaucacgcgggaguucagcgugaacgcgggcgugaccacccccgucuccaccuacaugcugacgaacagcgagcuccugucccugaucaacgacaugccgaucaccaacgaccagaagaagcucaugagcaacaacgugcagaucgugcgccagcaguccuacagcaucaugugcaucaucaaggaggagguccuggccuacguggugcagcugccccucuacggggucaucgacacccccugcuggaagcugcacaccagcccccugugcacgaccaacaccaaggagggcuccaacaucugccucacccggacggaccgcgggugguacugcgacaacgccggcagcguguccuucuucccgcaggccgagaccugcaagguccagagcaaccggguguucugcgacaccaugaacucccugacccugcccagcgaggugaaccucugcaacaucgacaucuucaaccccaaguacgacugcaagaucaugacguccaagaccgacgucagcuccagcgugaucaccucccugggcgccaucgugagcugcuacgggaagaccaagugcacggcgagcaacaagugccgcggcaucaucaagaccuucuccaacgggugcgacuacgucagcaacaagggcguggacaccguguccgucggcaacacccuguacuacgugaacaagcaggagggccagagccucuacgugaagggggagcccaucaucaacuucuacgacccgcuggucuuccccuccgacgaguucgacgccagcaucucccaggugaacgagaagaucaaccagagccuggccuucauccggaaguccgacgagcuccugcacaacgugaacgucggcaagagcaccacgaacaucaugaucaccaccaucaucaucgugaucaucgugauccugcugcuccugaucgccgucgggcuguuccucuacugcaaggcccgcugaggacuaguaauaaggaaacuguaugaaugucugugggcaggaagugaagagauccuucuguaaagguuuuuggaauuaugucugcugaauaauaaacuuuuuugaaauaauaaaucugguagaaaaaugagaucuaaaaaaaaaaaaaaaaaaaaaaaaaaaaaaaaaaaaaaaaaaaaaaaaaaaaaaaaaaaaaaaaugcaucccccccccccccccccccccccccccccccaaaggcucuuuucagagccaccagaauu

SEQ ID NO: 19765 - RNA, 1910 nt, Artificial Sequence
  mRNA product Design g-5 comprising derived and/or modified sequence from HRSV(Memphis-37)__AIY60640.1__F-del_DSCav1_mut8 (opt1)
gggagacccgugacccggaaguuguacggcuacgcgacuuucccucccacaaacccucgcgcccuuccuuuccuacuugggcccggcagaaagcuuaccauggagcugcccauccucaagaccaacgccaucaccacgauccuggccgcggugacccugugcuucgccagcucccagaacaucaccgaggaguucuaccagagcacgugcuccgccgucagcaagggcuaccucggggcccugcgcaccggcugguacaccuccgugaucaccaucgagcugagcaacaucaaggagaucaagugcaacgggaccgacgccaaggugaagcucaucaagcaggagcuggacaaguacaagaacgcggucacggaccugcagcuccugaugcaguccaccccggccgccggcagcggguccgccaucgcgagcggcaucgccgugugcaaggugcugcaccucgagggcgaggucaacaagaucaagaacgcccugcuguccaccaacaaggccguggugagccucuccgggugcggcgucagcgugcugaccuucaaggugcuggaccucaagaacuacaucgacaagcagcugcugcccauccucaacaagcaguccugcagcauccccaacaucgagacggucaucgaguuccagcagaagaacaaccggcugcuggagaucacccgcgaguucuccgugaacgccggggugaccacccccgucagcacguacaugcucaccaacuccgagcugcugagccucaucaacgacaugccgaucaccaacgaccagaagaagcugaugagcaacaacgugcagaucgugcggcagcaguccuacagcaucaugugcaucaucaaggaggagguccuggcguacguggugcagcucccccuguacggcgucaucgacacccccugcuggaagcugcacacgagcccccucugcaccaccaacaccaaggagggguccaacaucugccugacgcgcaccgaccggggcugguacugcgacaacgccggcuccgugagcuucuucccgcaggccgagaccugcaaggugcaguccaaccgcgucuucugcgacaccaugaacagccugacgcuccccuccgaggugaaccugugcaacaucgacaucuucaaccccaaguacgacugcaagaucaugaccagcaagaccgacgucuccagcuccgugaucaccagccugggggccaucguguccugcuacggcaagacgaagugcaccgccagcaacaagugccgggggaucaucaagaccuucuccaacggcugcgacuacgucagcaacaagggcguggacaccguguccgucgggaacacgcucuacuacgugaacaagcaggagggccagagccuguacgugaagggggagcccaucaucaacuucuacgacccgcuggucuuccccagcgacgaguucgacgcguccaucagccaggugaacgagaagaucaaccagucccucgccuucauccgcaagagcgacgagcugcugcacaacgugaacgucggcaaguccaccaccaacaucaugaucaccaccaucaucaucgugaucaucgugauccuccugcugcucaucgccgucgggcuguuccuguacugcaaggcccggugaggacuaguaauaaggaaacuguaugaaugucugugggcaggaagugaagagauccuucuguaaagguuuuuggaauuaugucugcugaauaauaaacuuuuuugaaauaauaaaucugguagaaaaaugagaucuaaaaaaaaaaaaaaaaaaaaaaaaaaaaaaaaaaaaaaaaaaaaaaaaaaaaaaaaaaaaaaaaugcaucccccccccccccccccccccccccccccccaaaggcucuuuucagagccaccagaauu

SEQ ID NO: 19766 - RNA, 1910 nt, Artificial Sequence
  mRNA product Design g-5 comprising derived and/or modified sequence from HRSV(Memphis-37)__AIY60640.1__F-del_DSCav1_mut8 (opt2)
gggagacccgugacccggaaguuguacggcuacgcgacuuucccucccacaaacccucgcgcccuuccuuuccuacuugggcccggcagaaagcuuaccauggagcuccccauccucaagaccaacgccaucaccaccauccucgccgccgucacccucugcuucgccuccucccagaacaucaccgaggaguucuaccaguccaccugcuccgccgucuccaagggcuaccucggcgcccuccgcaccggcugguacaccuccgucaucaccaucgagcucuccaacaucaaggagaucaagugcaacggcaccgacgccaaggucaagcucaucaagcaggagcucgacaaguacaagaacgccgucaccgaccuccagcuccucaugcaguccacccccgccgccggcuccggcuccgccaucgccuccggcaucgccgucugcaagguccuccaccucgagggcgaggucaacaagaucaagaacgcccuccucuccaccaacaaggccgucgucucccucuccggcugcggcgucuccguccucaccuucaagguccucgaccucaagaacuacaucgacaagcagcuccuccccauccucaacaagcaguccugcuccauccccaacaucgagaccgucaucgaguuccagcagaagaacaaccgccuccucgagaucacccgcgaguucuccgucaacgccggcgucaccacccccgucuccaccuacaugcucaccaacuccgagcuccucucccucaucaacgacaugcccaucaccaacgaccagaagaagcucauguccaacaacguccagaucguccgccagcaguccuacuccaucaugugcaucaucaaggaggagguccucgccuacgucguccagcucccccucuacggcgucaucgacacccccugcuggaagcuccacaccuccccccucugcaccaccaacaccaaggagggcuccaacaucugccucacccgcaccgaccgcggcugguacugcgacaacgccggcuccgucuccuucuucccccaggccgagaccugcaagguccaguccaaccgcgucuucugcgacaccaugaacucccucacccuccccuccgaggucaaccucugcaacaucgacaucuucaaccccaaguacgacugcaagaucaugaccuccaagaccgacgucuccuccuccgucaucaccucccucggcgccaucgucuccugcuacggcaagaccaagugcaccgccuccaacaagugccgcggcaucaucaagaccuucuccaacggcugcgacuacgucuccaacaagggcgucgacaccgucuccgucggcaacacccucuacuacgucaacaagcaggagggccagucccucuacgucaagggcgagcccaucaucaacuucuacgacccccucgucuuccccuccgacgaguucgacgccuccaucucccaggucaacgagaagaucaaccagucccucgccuucauccgcaaguccgacgagcuccuccacaacgucaacgucggcaaguccaccaccaacaucaugaucaccaccaucaucaucgucaucaucgucauccuccuccuccucaucgccgucggccucuuccucuacugcaaggcccgcugaggacuaguaauaaggaaacuguaugaaugucugugggcaggaagugaagagauccuucuguaaagguuuuuggaauuaugucugcugaauaauaaacuuuuuugaaauaauaaaucugguagaaaaaugagaucuaaaaaaaaaaaaaaaaaaaaaaaaaaaaaaaaaaaaaaaaaaaaaaaaaaaaaaaaaaaaaaaaugcaucccccccccccccccccccccccccccccccaaaggcucuuuucagagccaccagaauu

SEQ ID NO: 19767 - RNA, 1910 nt, Artificial Sequence
  mRNA product Design g-5 comprising derived and/or modified sequence from HRSV(Memphis-37)__AIY60640.1__F-del_DSCav1_mut8 (opt3)
gggagacccgugacccggaaguuguacggcuacgcgacuuucccucccacaaacccucgcgcccuuccuuuccuacuugggcccggcagaaagcuuaccauggagcugcccauccucaagaccaacgccauuacaacuauacuugcugcagugacgcugugcuucgccagcucccagaauaucaccgaagaguuuuaccaaucuacauguucagcggucaguaaaggcuauuugggggcuuuaagaacuggaugguacaccagcguuauuacaaucgaacuguccaacauuaaggagaucaaaugcaaugguaccgacgccaaggugaaacuaauaaagcaggaacucgauaaguauaaaaacgcaguaacugaccugcagcuucugaugcagucuacuccugccgcuggcucggggucagcaaucgccagcggaauugcuguguguaaggucuugcaccucgagggcgaggugaauaaaaucaagaacgcccugcugaguaccaauaaagcgguugugucccucucugguugcggggucagcguguuaacguucaagguacuggaucuuaagaacuacauugacaaacaauugcugccaauccuaaauaagcaguccuguucaauaccgaacauugaaacuguuaucgaguuucagcagaaaaauaacaggcuccuggaaauuacccgggaguucagugugaaugcaggagucacaacucccgugagcaccuauaugcuuacaaacucugagcuguugucccucaucaaugauaugccuaucaccaacgaccaaaagaaacugaugucaaacaaugugcagauuguccgccagcagagcuacaguauaaugugcaucauuaaggaagagguuuuagccuaugugguacaacugccacucuacggcgugaucgauacgcccuguuggaaacuucauacuucuccucugugcacaaccaacacuaaggaaggcuccaauauauguuugacacgaaccgaccgugggugguacugcgauaacgcuggaagcgucucguuuuucccacaggccgagacguguaaggugcagucuaauagaguuuucugcgacaccaugaacucccuaacacugcccucagaagugaaucucugcaacauugauaucuucaauccuaaauaugacuguaagaucaugacaaguaaaaccgaugucagcuccucugugauuacaagccugggugcaaucguaucaugcuacggcaagacuaaauguaccgcuaguaacaagugcagggggauuauaaagacauuuuccaauggaugugacuauguuagcaacaaaggcguggacaccgucucuguggguaauacucuuuacuaugucaacaagcaagaggggcagucacuguacgugaaaggagagccaaucauuaauuucuaugauccguugguuuuucccagugacgaauuugaugccagcaucucccaggugaacgagaagaucaaccagucucucgcguuuauucggaaaucggacgaacuguuacacaauguaaacgucggcaagagcacgacaaauauaaugaucaccacuauuaucauugugaucauaguuauccugcuacuccugauugccgugggccuuuucuuguacugcaaggcacgcugaggacuaguaauaaggaaacuguaugaaugucugugggcaggaagugaagagauccuucuguaaagguuuuuggaauuaugucugcugaauaauaaacuuuuuugaaauaauaaaucugguagaaaaaugagaucuaaaaaaaaaaaaaaaaaaaaaaaaaaaaaaaaaaaaaaaaaaaaaaaaaaaaaaaaaaaaaaaaugcaucccccccccccccccccccccccccccccccaaaggcucuuuucagagccaccagaauu

SEQ ID NO: 19768 - RNA, 1910 nt, Artificial Sequence
  mRNA product Design g-5 comprising derived and/or modified sequence from HRSV(Memphis-37)__AIY60640.1__F-del_DSCav1_mut8 (opt4)
gggagacccgugacccggaaguuguacggcuacgcgacuuucccucccacaaacccucgcgcccuuccuuuccuacuugggcccggcagaaagcuuaccauggagcugcccauccugaagaccaacgccaucaccaccauccuggccgccgugacccugugcuucgccagcagccagaacaucaccgaggaguucuaccagagcaccugcagcgccgugagcaagggcuaccugggcgcccugagaaccggcugguacaccagcgugaucaccaucgagcugagcaacaucaaggagaucaagugcaacggcaccgacgccaaggugaagcugaucaagcaggagcuggacaaguacaagaacgccgugaccgaccugcagcugcugaugcagagcacccccgccgccggcagcggcagcgccaucgccagcggcaucgccgugugcaaggugcugcaccuggagggcgaggugaacaagaucaagaacgcccugcugagcaccaacaaggccguggugagccugagcggcugcggcgugagcgugcugaccuucaaggugcuggaccugaagaacuacaucgacaagcagcugcugcccauccugaacaagcagagcugcagcauccccaacaucgagaccgugaucgaguuccagcagaagaacaacagacugcuggagaucaccagagaguucagcgugaacgccggcgugaccacccccgugagcaccuacaugcugaccaacagcgagcugcugagccugaucaacgacaugcccaucaccaacgaccagaagaagcugaugagcaacaacgugcagaucgugagacagcagagcuacagcaucaugugcaucaucaaggaggaggugcuggccuacguggugcagcugccccuguacggcgugaucgacacccccugcuggaagcugcacaccagcccccugugcaccaccaacaccaaggagggcagcaacaucugccugaccagaaccgacagaggcugguacugcgacaacgccggcagcgugagcuucuucccccaggccgagaccugcaaggugcagagcaacagaguguucugcgacaccaugaacagccugacccugcccagcgaggugaaccugugcaacaucgacaucuucaaccccaaguacgacugcaagaucaugaccagcaagaccgacgugagcagcagcgugaucaccagccugggcgccaucgugagcugcuacggcaagaccaagugcaccgccagcaacaagugcagaggcaucaucaagaccuucagcaacggcugcgacuacgugagcaacaagggcguggacaccgugagcgugggcaacacccuguacuacgugaacaagcaggagggccagagccuguacgugaagggcgagcccaucaucaacuucuacgacccccugguguuccccagcgacgaguucgacgccagcaucagccaggugaacgagaagaucaaccagagccuggccuucaucagaaagagcgacgagcugcugcacaacgugaacgugggcaagagcaccaccaacaucaugaucaccaccaucaucaucgugaucaucgugauccugcugcugcugaucgccgugggccuguuccuguacugcaaggccagaugaggacuaguaauaaggaaacuguaugaaugucugugggcaggaagugaagagauccuucuguaaagguuuuuggaauuaugucugcugaauaauaaacuuuuuugaaauaauaaaucugguagaaaaaugagaucuaaaaaaaaaaaaaaaaaaaaaaaaaaaaaaaaaaaaaaaaaaaaaaaaaaaaaaaaaaaaaaaaugcaucccccccccccccccccccccccccccccccaaaggcucuuuucagagccaccagaauu

SEQ ID NO: 19769 - RNA, 1910 nt, Artificial Sequence
  mRNA product Design g-5 comprising derived and/or modified sequence from HRSV(Memphis-37)__AIY60640.1__F-del_DSCav1_mut8 (opt5)
gggagacccgugacccggaaguuguacggcuacgcgacuuucccucccacaaacccucgcgcccuuccuuuccuacuugggcccggcagaaagcuuaccauggagcugcccauccucaagaccaacgccauuacaacgauccuggcugccgugacccuuugcuucgcgagcucccagaauauuacagaagaguuuuaccaaucuaccuguagcgcugucuccaaaggcuaucugggggcccucagaacaggaugguacaccucuguuaucacaauugaacugagcaacaucaaggagaucaaaugcaauggcaccgacgccaaggugaaacuuauuaagcaggaacuggauaaguauaaaaacgcugugacggaccuccagcugcugaugcaguccaccccugccgcugggucuggaagcgccaucgcguccggcauugccgucuguaaggugcuccaccuggagggggagguuaauaaaaucaagaacgcccuucugagcacaaauaaagcuguggucucucucuccggaugcggcgugagcguucugaccuucaaggugcuugaucugaagaacuacauugacaaacaacuccugccgauccugaauaagcagucuuguuccauucccaacaucgaaacagucaucgaguuucagcagaaaaauaaccggcuccuggaaauuacccgcgaguucagcgugaaugcuggcgugacgacaccugucucuaccuauaugcuuacaaacuccgagcugcucagccugaucaaugauaugcccauuaccaacgaccaaaagaaacuuauguccaacaauguucagaucgugagacagcagucuuacagcauuaugugcaucaucaaggaagaggugcuggccuaugucgugcaacucccucuguacgggguuauugauacccccuguuggaaacugcauacauccccucucugcacgaccaacacaaaggaaggaagcaauaucugucugacccggacagaccgcggcugguacugcgauaacgcggggucuguguccuuuuucccgcaggccgagaccuguaagguccagagcaauagaguguuuugcgacacgaugaacucucuuacacugcccagcgaaguuaaucucugcaacauugauaucuucaauccuaaauaugacuguaagauuaugaccuccaaaaccgaugugucuagcuccgucaucacaagccugggagcuaucgugucuugcuacggcaagaccaaauguacagccuccaacaagugccgggggauuaucaagacguuuagcaauggaugugacuaugucucuaacaaaggcguggacaccguuuccgugggcaauacacuuuacuaugucaacaagcaagaggggcagagccuguacgugaaaggagagcccauuaucaauuucuaugauccucucguuuuucccuccgacgaguucgaugcuucuauuagccaggugaacgaaaagaucaaccagucccuggccuuuauucgcaaaucugacgaacugcuccacaaugucaacgugggcaagagcaccacaaauaucaugaucaccacgauuaucauugugaucauuguuauccugcuucugcucaucgccgucgggcuguuccuguacugcaaggcuagaugaggacuaguaauaaggaaacuguaugaaugucugugggcaggaagugaagagauccuucuguaaagguuuuuggaauuaugucugcugaauaauaaacuuuuuugaaauaauaaaucugguagaaaaaugagaucuaaaaaaaaaaaaaaaaaaaaaaaaaaaaaaaaaaaaaaaaaaaaaaaaaaaaaaaaaaaaaaaaugcaucccccccccccccccccccccccccccccccaaaggcucuuuucagagccaccagaauu

SEQ ID NO: 19770 - RNA, 1910 nt, Artificial Sequence
  mRNA product Design g-5 comprising derived and/or modified sequence from HRSV(Memphis-37)__AIY60640.1__F-del_DSCav1_mut8 (opt6)
gggagacccgugacccggaaguuguacggcuacgcgacuuucccucccacaaacccucgcgcccuuccuuuccuacuugggcccggcagaaagcuuaccauggaacuacccauacuaaaaacaaacgcaauuacaacaauacuugccgcaguaaccuuaugcuuugccucaucccaaaacauaacagaagaauuuuaucaaucaacaugcuccgcaguaucaaaaggauaccuaggcgcucuaagaacaggaugguacacauccguaaucacaauagaacuauccaauauaaaagaaauaaaauguaauggaacagaugcaaaaguuaaauuaauaaaacaagaacuagacaaauacaaaaacgcaguuaccgaucuccaacuauuaaugcaaucaacaccagcugcaggaaguggaagcgccauagcaagcggaauagcagucugcaaaguauuacaucuugaaggcgaaguaaacaaaaucaaaaaugcccuccucucaacaaacaaagcuguaguaucccuaucaggaugcgguguaucuguucuuacauuuaaaguacucgaucuaaaaaacuacaucgauaaacaguuacuuccaauacucaacaaacaaucauguagcauaccaaacauagaaacaguaauagaauuucaacaaaaaaacaaucgacuacucgaaauaacuagagaauuuucuguaaacgcuggaguaaccacaccagugucuaccuauaugcuuacaaauagcgaacuccuaucacuaaucaaugacaugccaauaacaaaugaccagaaaaaacucaugucaaauaacguacaaauaguacgacaacaaagcuacuccauaaugugcauaaucaaagaagaaguauuagccuacguuguucaacuaccauuauauggaguuauagacacuccaugcuggaaauuacauacaagcccacucuguacaacaaacacaaaagaaggcucaaacauaugcuuaacaagaacagauagaggaugguacugcgauaacgcaggcucagucucauuuuuuccacaagccgaaaccugcaaaguacaaucaaauagaguuuuuugcgacacaaugaacucacucacucuaccaagugaaguaaaucucuguaauaucgacauauucaacccaaaauaugacugcaaaauaaugacaucuaaaaccgauguauccucaagcguaaucacaucauuaggagcuauaguuuccugcuacgguaaaacaaaaugcacagcauccaacaaaugucgcgguaucaucaaaacauucuccaacggaugugauuacguaucaaacaaaggugucgacaccguaagcguaggcaacacuuuauacuauguaaacaaacaagaaggacaaagucuauauguaaaaggagaaccaauaauaaacuucuaugacccccuaguauucccuuccgacgaauuugaugcaagcauuucacaaguuaacgaaaaaaucaaucaaucccuugcuuucauaagaaaaucagacgaauuacuacacaacguaaacguaggaaaaagcacaacaaauaucaugauuacaacaauaauaauuguaauaauaguaauacuccucuuacuuauagcagucggcuuauuccuuuacugcaaagcaagauaaggacuaguaauaaggaaacuguaugaaugucugugggcaggaagugaagagauccuucuguaaagguuuuuggaauuaugucugcugaauaauaaacuuuuuugaaauaauaaaucugguagaaaaaugagaucuaaaaaaaaaaaaaaaaaaaaaaaaaaaaaaaaaaaaaaaaaaaaaaaaaaaaaaaaaaaaaaaaugcaucccccccccccccccccccccccccccccccaaaggcucuuuucagagccaccagaauu

SEQ ID NO: 19771 - RNA, 1910 nt, Artificial Sequence
  mRNA product Design g-5 comprising derived and/or modified sequence from HRSV(Memphis-37)__AIY60640.1__F-del_DSCav1_mut8 (opt11)
gggagacccgugacccggaaguuguacggcuacgcgacuuucccucccacaaacccucgcgcccuuccuuuccuacuugggcccggcagaaagcuuaccauggaacuccccauccuaaaaaccaacgcaaucaccaccauccucgccgccguaacacucugcuuugcaagcucccaaaacaucaccgaagaauuuuaccaaucuaccugcagcgccguaucuaaaggauaccuaggagcccucagaaccgguugguacaccucugucaucacaauagaacucuccaacaucaaagaaaucaaaugcaacggcaccgacgccaaagucaaacucaucaaacaagaacucgacaaauauaaaaacgccguaaccgaccuccaacuccucaugcaauccacccccgccgccggcaguggcuccgcuaucgccuccggaaucgccguuugcaaaguccugcaccuagaaggcgaagucaacaaaaucaaaaacgcccugcucucaaccaacaaagcugucguaagccucuccggcugcggagucuccguccuuaccuucaaaguacucgaccuuaaaaacuacaucgacaaacaacuucuccccauacucaauaaacaauccugcuccauacccaacaucgaaacagucaucgaguuccaacagaaaaauaaccgccuccucgaaauaacccgcgaguucuccgucaacgcaggcgucaccaccccagucuccaccuacaugcugacaaacuccgaacuccuaucccucaucaacgacaugcccaucaccaacgaccaaaagaaacucaugagcaauaacguccaaaucguacgacaacaauccuacagcaucauguguaucaucaaagaagaaguacucgccuacgucguccaacucccacuauacggcgucaucgacacaccaugcuggaaacuucacaccuccccacucugcaccacaaacacaaaagaaggcuccaacaucugccuuacccgaaccgaccgcgggugguacugcgacaacgccggaucagucucguucuuuccccaagccgaaaccugcaaaguacaaucaaaucgcgucuucugcgacaccaugaacuccuuaacacuaccauccgaaguaaaccucugcaacauagacaucuucaacccaaaauacgacugcaaaaucaugaccuccaaaaccgacguauccuccuccguaaucaccagccucggcgcaauagucucaugcuacggcaaaaccaaaugcaccgccuccaacaaaugccgcggcaucauaaaaacuuucucuaacggaugcgacuacgucagcaacaaaggcgucgacaccguauccguagguaauacacuuuacuacgucaauaaacaagaaggccaaucccucuacgucaaaggagaacccaucauaaacuucuacgacccccucgucuuccccuccgacgaguucgacgccuccaucagccaggucaacgaaaagaucaaccaaucacucgccuucauccgcaaaagcgacgaacuccuccacaacguaaacgucggcaaauccacaaccaacauaaugaucaccacuaucaucaucgugauaaucgucauuuuacuucuccucaucgccguaggccucuuccuauacugcaaagcccgcuaaggacuaguaauaaggaaacuguaugaaugucugugggcaggaagugaagagauccuucuguaaagguuuuuggaauuaugucugcugaauaauaaacuuuuuugaaauaauaaaucugguagaaaaaugagaucuaaaaaaaaaaaaaaaaaaaaaaaaaaaaaaaaaaaaaaaaaaaaaaaaaaaaaaaaaaaaaaaaugcaucccccccccccccccccccccccccccccccaaaggcucuuuucagagccaccagaauu

SEQ ID NO: 19772 - RNA, 1926 nt, Artificial Sequence
  mRNA product Design h-1 comprising derived and/or modified sequence from HRSV(Memphis-37)__AIY60640.1__F-del_DSCav1_mut8 (opt1)
gggagacccgugacccggaaguuguacggcuacgcgacuuucccucccacaaacccucgcgcccuuccuuuccuacuugggcccggcagaaagcuuaccauggagcugcccauccucaagaccaacgccaucaccacgauccuggccgcggugacccugugcuucgccagcucccagaacaucaccgaggaguucuaccagagcacgugcuccgccgucagcaagggcuaccucggcgcccugcgcaccgggugguacaccagcgugaucaccaucgagcuguccaacaucaaggagaucaagugcaacggcaccgacgccaaggugaagcucaucaagcaggagcuggacaaguacaagaacgcggucacggaccugcagcuccugaugcagagcaccccggccgccggcuccgggagcgcgaucgccuccggcaucgccgucugcaaggugcugcaccucgagggcgaggugaacaagaucaagaacgcccugcuguccaccaacaaggccgucgugagccucuccggcugcggggugagcguccugaccuucaaggugcuggaccucaagaacuacaucgacaagcagcugcugcccauccugaacaagcagagcugcuccauccccaacaucgagaccgucaucgaguuccagcagaagaacaaccgccuccuggagaucacgcgggaguucagcgugaacgcgggcgugaccacccccgucuccaccuacaugcugacgaacagcgagcuccugucccugaucaacgacaugccgaucaccaacgaccagaagaagcucaugagcaacaacgugcagaucgugcgccagcaguccuacagcaucaugugcaucaucaaggaggagguccuggccuacguggugcagcugccccucuacggggucaucgacacccccugcuggaagcugcacaccagcccccugugcacgaccaacaccaaggagggcuccaacaucugccucacccggacggaccgcgggugguacugcgacaacgccggcagcguguccuucuucccgcaggccgagaccugcaagguccagagcaaccggguguucugcgacaccaugaacucccugacccugcccagcgaggugaaccucugcaacaucgacaucuucaaccccaaguacgacugcaagaucaugacguccaagaccgacgucagcuccagcgugaucaccucccugggcgccaucgugagcugcuacgggaagaccaagugcacggcgagcaacaagugccgcggcaucaucaagaccuucuccaacgggugcgacuacgucagcaacaagggcguggacaccguguccgucggcaacacccuguacuacgugaacaagcaggagggccagagccucuacgugaagggggagcccaucaucaacuucuacgacccgcuggucuuccccuccgacgaguucgacgccagcaucucccaggugaacgagaagaucaaccagagccuggccuucauccggaaguccgacgagcuccugcacaacgugaacgucggcaagagcaccacgaacaucaugaucaccaccaucaucaucgugaucaucgugauccugcugcuccugaucgccgucgggcuguuccucuacugcaaggcccgcugaggacuaguacuggcugcaucucccuuuccucuguccuccauccuucucccaggauggugaagggggaccugguacccagugauccccaccccaggauccuaaaucaugacuuaccugcuaauaaaaacucauuggaaaagugagaagaucuaaaaaaaaaaaaaaaaaaaaaaaaaaaaaaaaaaaaaaaaaaaaaaaaaaaaaaaaaaaaaaaaugcaucccccccccccccccccccccccccccccccaaaggcucuuuucagagccaccagaauu

SEQ ID NO: 19773 - RNA, 1926 nt, Artificial Sequence
  mRNA product Design h-1 comprising derived and/or modified sequence from HRSV(Memphis-37)__AIY60640.1__F-del_DSCav1_mut8 (opt1)
gggagacccgugacccggaaguuguacggcuacgcgacuuucccucccacaaacccucgcgcccuuccuuuccuacuugggcccggcagaaagcuuaccauggagcugcccauccucaagaccaacgccaucaccacgauccuggccgcggugacccugugcuucgccagcucccagaacaucaccgaggaguucuaccagagcacgugcuccgccgucagcaagggcuaccucggggcccugcgcaccggcugguacaccuccgugaucaccaucgagcugagcaacaucaaggagaucaagugcaacgggaccgacgccaaggugaagcucaucaagcaggagcuggacaaguacaagaacgcggucacggaccugcagcuccugaugcaguccaccccggccgccggcagcggguccgccaucgcgagcggcaucgccgugugcaaggugcugcaccucgagggcgaggucaacaagaucaagaacgcccugcuguccaccaacaaggccguggugagccucuccgggugcggcgucagcgugcugaccuucaaggugcuggaccucaagaacuacaucgacaagcagcugcugcccauccucaacaagcaguccugcagcauccccaacaucgagacggucaucgaguuccagcagaagaacaaccggcugcuggagaucacccgcgaguucuccgugaacgccggggugaccacccccgucagcacguacaugcucaccaacuccgagcugcugagccucaucaacgacaugccgaucaccaacgaccagaagaagcugaugagcaacaacgugcagaucgugcggcagcaguccuacagcaucaugugcaucaucaaggaggagguccuggcguacguggugcagcucccccuguacggcgucaucgacacccccugcuggaagcugcacacgagcccccucugcaccaccaacaccaaggagggguccaacaucugccugacgcgcaccgaccggggcugguacugcgacaacgccggcuccgugagcuucuucccgcaggccgagaccugcaaggugcaguccaaccgcgucuucugcgacaccaugaacagccugacgcuccccuccgaggugaaccugugcaacaucgacaucuucaaccccaaguacgacugcaagaucaugaccagcaagaccgacgucuccagcuccgugaucaccagccugggggccaucguguccugcuacggcaagacgaagugcaccgccagcaacaagugccgggggaucaucaagaccuucuccaacggcugcgacuacgucagcaacaagggcguggacaccguguccgucgggaacacgcucuacuacgugaacaagcaggagggccagagccuguacgugaagggggagcccaucaucaacuucuacgacccgcuggucuuccccagcgacgaguucgacgcguccaucagccaggugaacgagaagaucaaccagucccucgccuucauccgcaagagcgacgagcugcugcacaacgugaacgucggcaaguccaccaccaacaucaugaucaccaccaucaucaucgugaucaucgugauccuccugcugcucaucgccgucgggcuguuccuguacugcaaggcccggugaggacuaguacuggcugcaucucccuuuccucuguccuccauccuucucccaggauggugaagggggaccugguacccagugauccccaccccaggauccuaaaucaugacuuaccugcuaauaaaaacucauuggaaaagugagaagaucuaaaaaaaaaaaaaaaaaaaaaaaaaaaaaaaaaaaaaaaaaaaaaaaaaaaaaaaaaaaaaaaaugcaucccccccccccccccccccccccccccccccaaaggcucuuuucagagccaccagaauu

SEQ ID NO: 19774 - RNA, 1926 nt, Artificial Sequence
  mRNA product Design h-1 comprising derived and/or modified sequence from HRSV(Memphis-37)__AIY60640.1__F-del_DSCav1_mut8 (opt2)
gggagacccgugacccggaaguuguacggcuacgcgacuuucccucccacaaacccucgcgcccuuccuuuccuacuugggcccggcagaaagcuuaccauggagcuccccauccucaagaccaacgccaucaccaccauccucgccgccgucacccucugcuucgccuccucccagaacaucaccgaggaguucuaccaguccaccugcuccgccgucuccaagggcuaccucggcgcccuccgcaccggcugguacaccuccgucaucaccaucgagcucuccaacaucaaggagaucaagugcaacggcaccgacgccaaggucaagcucaucaagcaggagcucgacaaguacaagaacgccgucaccgaccuccagcuccucaugcaguccacccccgccgccggcuccggcuccgccaucgccuccggcaucgccgucugcaagguccuccaccucgagggcgaggucaacaagaucaagaacgcccuccucuccaccaacaaggccgucgucucccucuccggcugcggcgucuccguccucaccuucaagguccucgaccucaagaacuacaucgacaagcagcuccuccccauccucaacaagcaguccugcuccauccccaacaucgagaccgucaucgaguuccagcagaagaacaaccgccuccucgagaucacccgcgaguucuccgucaacgccggcgucaccacccccgucuccaccuacaugcucaccaacuccgagcuccucucccucaucaacgacaugcccaucaccaacgaccagaagaagcucauguccaacaacguccagaucguccgccagcaguccuacuccaucaugugcaucaucaaggaggagguccucgccuacgucguccagcucccccucuacggcgucaucgacacccccugcuggaagcuccacaccuccccccucugcaccaccaacaccaaggagggcuccaacaucugccucacccgcaccgaccgcggcugguacugcgacaacgccggcuccgucuccuucuucccccaggccgagaccugcaagguccaguccaaccgcgucuucugcgacaccaugaacucccucacccuccccuccgaggucaaccucugcaacaucgacaucuucaaccccaaguacgacugcaagaucaugaccuccaagaccgacgucuccuccuccgucaucaccucccucggcgccaucgucuccugcuacggcaagaccaagugcaccgccuccaacaagugccgcggcaucaucaagaccuucuccaacggcugcgacuacgucuccaacaagggcgucgacaccgucuccgucggcaacacccucuacuacgucaacaagcaggagggccagucccucuacgucaagggcgagcccaucaucaacuucuacgacccccucgucuuccccuccgacgaguucgacgccuccaucucccaggucaacgagaagaucaaccagucccucgccuucauccgcaaguccgacgagcuccuccacaacgucaacgucggcaaguccaccaccaacaucaugaucaccaccaucaucaucgucaucaucgucauccuccuccuccucaucgccgucggccucuuccucuacugcaaggcccgcugaggacuaguacuggcugcaucucccuuuccucuguccuccauccuucucccaggauggugaagggggaccugguacccagugauccccaccccaggauccuaaaucaugacuuaccugcuaauaaaaacucauuggaaaagugagaagaucuaaaaaaaaaaaaaaaaaaaaaaaaaaaaaaaaaaaaaaaaaaaaaaaaaaaaaaaaaaaaaaaaugcaucccccccccccccccccccccccccccccccaaaggcucuuuucagagccaccagaauu

SEQ ID NO: 19775 - RNA, 1926 nt, Artificial Sequence
  mRNA product Design h-1 comprising derived and/or modified sequence from HRSV(Memphis-37)__AIY60640.1__F-del_DSCav1_mut8 (opt3)
gggagacccgugacccggaaguuguacggcuacgcgacuuucccucccacaaacccucgcgcccuuccuuuccuacuugggcccggcagaaagcuuaccauggagcugcccauccucaagaccaacgccauuacaacuauacuugcugcagugacgcugugcuucgccagcucccagaauaucaccgaagaguuuuaccaaucuacauguucagcggucaguaaaggcuauuugggggcuuuaagaacuggaugguacaccagcguuauuacaaucgaacuguccaacauuaaggagaucaaaugcaaugguaccgacgccaaggugaaacuaauaaagcaggaacucgauaaguauaaaaacgcaguaacugaccugcagcuucugaugcagucuacuccugccgcuggcucggggucagcaaucgccagcggaauugcuguguguaaggucuugcaccucgagggcgaggugaauaaaaucaagaacgcccugcugaguaccaauaaagcgguugugucccucucugguugcggggucagcguguuaacguucaagguacuggaucuuaagaacuacauugacaaacaauugcugccaauccuaaauaagcaguccuguucaauaccgaacauugaaacuguuaucgaguuucagcagaaaaauaacaggcuccuggaaauuacccgggaguucagugugaaugcaggagucacaacucccgugagcaccuauaugcuuacaaacucugagcuguugucccucaucaaugauaugccuaucaccaacgaccaaaagaaacugaugucaaacaaugugcagauuguccgccagcagagcuacaguauaaugugcaucauuaaggaagagguuuuagccuaugugguacaacugccacucuacggcgugaucgauacgcccuguuggaaacuucauacuucuccucugugcacaaccaacacuaaggaaggcuccaauauauguuugacacgaaccgaccgugggugguacugcgauaacgcuggaagcgucucguuuuucccacaggccgagacguguaaggugcagucuaauagaguuuucugcgacaccaugaacucccuaacacugcccucagaagugaaucucugcaacauugauaucuucaauccuaaauaugacuguaagaucaugacaaguaaaaccgaugucagcuccucugugauuacaagccugggugcaaucguaucaugcuacggcaagacuaaauguaccgcuaguaacaagugcagggggauuauaaagacauuuuccaauggaugugacuauguuagcaacaaaggcguggacaccgucucuguggguaauacucuuuacuaugucaacaagcaagaggggcagucacuguacgugaaaggagagccaaucauuaauuucuaugauccguugguuuuucccagugacgaauuugaugccagcaucucccaggugaacgagaagaucaaccagucucucgcguuuauucggaaaucggacgaacuguuacacaauguaaacgucggcaagagcacgacaaauauaaugaucaccacuauuaucauugugaucauaguuauccugcuacuccugauugccgugggccuuuucuuguacugcaaggcacgcugaggacuaguacuggcugcaucucccuuuccucuguccuccauccuucucccaggauggugaagggggaccugguacccagugauccccaccccaggauccuaaaucaugacuuaccugcuaauaaaaacucauuggaaaagugagaagaucuaaaaaaaaaaaaaaaaaaaaaaaaaaaaaaaaaaaaaaaaaaaaaaaaaaaaaaaaaaaaaaaaugcaucccccccccccccccccccccccccccccccaaaggcucuuuucagagccaccagaauu

SEQ ID NO: 19776 - RNA, 1926 nt, Artificial Sequence
  mRNA product Design h-1 comprising derived and/or modified sequence from HRSV(Memphis-37)__AIY60640.1__F-del_DSCav1_mut8 (opt4)
gggagacccgugacccggaaguuguacggcuacgcgacuuucccucccacaaacccucgcgcccuuccuuuccuacuugggcccggcagaaagcuuaccauggagcugcccauccugaagaccaacgccaucaccaccauccuggccgccgugacccugugcuucgccagcagccagaacaucaccgaggaguucuaccagagcaccugcagcgccgugagcaagggcuaccugggcgcccugagaaccggcugguacaccagcgugaucaccaucgagcugagcaacaucaaggagaucaagugcaacggcaccgacgccaaggugaagcugaucaagcaggagcuggacaaguacaagaacgccgugaccgaccugcagcugcugaugcagagcacccccgccgccggcagcggcagcgccaucgccagcggcaucgccgugugcaaggugcugcaccuggagggcgaggugaacaagaucaagaacgcccugcugagcaccaacaaggccguggugagccugagcggcugcggcgugagcgugcugaccuucaaggugcuggaccugaagaacuacaucgacaagcagcugcugcccauccugaacaagcagagcugcagcauccccaacaucgagaccgugaucgaguuccagcagaagaacaacagacugcuggagaucaccagagaguucagcgugaacgccggcgugaccacccccgugagcaccuacaugcugaccaacagcgagcugcugagccugaucaacgacaugcccaucaccaacgaccagaagaagcugaugagcaacaacgugcagaucgugagacagcagagcuacagcaucaugugcaucaucaaggaggaggugcuggccuacguggugcagcugccccuguacggcgugaucgacacccccugcuggaagcugcacaccagcccccugugcaccaccaacaccaaggagggcagcaacaucugccugaccagaaccgacagaggcugguacugcgacaacgccggcagcgugagcuucuucccccaggccgagaccugcaaggugcagagcaacagaguguucugcgacaccaugaacagccugacccugcccagcgaggugaaccugugcaacaucgacaucuucaaccccaaguacgacugcaagaucaugaccagcaagaccgacgugagcagcagcgugaucaccagccugggcgccaucgugagcugcuacggcaagaccaagugcaccgccagcaacaagugcagaggcaucaucaagaccuucagcaacggcugcgacuacgugagcaacaagggcguggacaccgugagcgugggcaacacccuguacuacgugaacaagcaggagggccagagccuguacgugaagggcgagcccaucaucaacuucuacgacccccugguguuccccagcgacgaguucgacgccagcaucagccaggugaacgagaagaucaaccagagccuggccuucaucagaaagagcgacgagcugcugcacaacgugaacgugggcaagagcaccaccaacaucaugaucaccaccaucaucaucgugaucaucgugauccugcugcugcugaucgccgugggccuguuccuguacugcaaggccagaugaggacuaguacuggcugcaucucccuuuccucuguccuccauccuucucccaggauggugaagggggaccugguacccagugauccccaccccaggauccuaaaucaugacuuaccugcuaauaaaaacucauuggaaaagugagaagaucuaaaaaaaaaaaaaaaaaaaaaaaaaaaaaaaaaaaaaaaaaaaaaaaaaaaaaaaaaaaaaaaaugcaucccccccccccccccccccccccccccccccaaaggcucuuuucagagccaccagaauu

SEQ ID NO: 19777 - RNA, 1926 nt, Artificial Sequence
  mRNA product Design h-1 comprising derived and/or modified sequence from HRSV(Memphis-37)__AIY60640.1__F-del_DSCav1_mut8 (opt5)
gggagacccgugacccggaaguuguacggcuacgcgacuuucccucccacaaacccucgcgcccuuccuuuccuacuugggcccggcagaaagcuuaccauggagcugcccauccucaagaccaacgccauuacaacgauccuggcugccgugacccuuugcuucgcgagcucccagaauauuacagaagaguuuuaccaaucuaccuguagcgcugucuccaaaggcuaucugggggcccucagaacaggaugguacaccucuguuaucacaauugaacugagcaacaucaaggagaucaaaugcaauggcaccgacgccaaggugaaacuuauuaagcaggaacuggauaaguauaaaaacgcugugacggaccuccagcugcugaugcaguccaccccugccgcugggucuggaagcgccaucgcguccggcauugccgucuguaaggugcuccaccuggagggggagguuaauaaaaucaagaacgcccuucugagcacaaauaaagcuguggucucucucuccggaugcggcgugagcguucugaccuucaaggugcuugaucugaagaacuacauugacaaacaacuccugccgauccugaauaagcagucuuguuccauucccaacaucgaaacagucaucgaguuucagcagaaaaauaaccggcuccuggaaauuacccgcgaguucagcgugaaugcuggcgugacgacaccugucucuaccuauaugcuuacaaacuccgagcugcucagccugaucaaugauaugcccauuaccaacgaccaaaagaaacuuauguccaacaauguucagaucgugagacagcagucuuacagcauuaugugcaucaucaaggaagaggugcuggccuaugucgugcaacucccucuguacgggguuauugauacccccuguuggaaacugcauacauccccucucugcacgaccaacacaaaggaaggaagcaauaucugucugacccggacagaccgcggcugguacugcgauaacgcggggucuguguccuuuuucccgcaggccgagaccuguaagguccagagcaauagaguguuuugcgacacgaugaacucucuuacacugcccagcgaaguuaaucucugcaacauugauaucuucaauccuaaauaugacuguaagauuaugaccuccaaaaccgaugugucuagcuccgucaucacaagccugggagcuaucgugucuugcuacggcaagaccaaauguacagccuccaacaagugccgggggauuaucaagacguuuagcaauggaugugacuaugucucuaacaaaggcguggacaccguuuccgugggcaauacacuuuacuaugucaacaagcaagaggggcagagccuguacgugaaaggagagcccauuaucaauuucuaugauccucucguuuuucccuccgacgaguucgaugcuucuauuagccaggugaacgaaaagaucaaccagucccuggccuuuauucgcaaaucugacgaacugcuccacaaugucaacgugggcaagagcaccacaaauaucaugaucaccacgauuaucauugugaucauuguuauccugcuucugcucaucgccgucgggcuguuccuguacugcaaggcuagaugaggacuaguacuggcugcaucucccuuuccucuguccuccauccuucucccaggauggugaagggggaccugguacccagugauccccaccccaggauccuaaaucaugacuuaccugcuaauaaaaacucauuggaaaagugagaagaucuaaaaaaaaaaaaaaaaaaaaaaaaaaaaaaaaaaaaaaaaaaaaaaaaaaaaaaaaaaaaaaaaugcaucccccccccccccccccccccccccccccccaaaggcucuuuucagagccaccagaauu

SEQ ID NO: 19778 - RNA, 1926 nt, Artificial Sequence
  mRNA product Design h-1 comprising derived and/or modified sequence from HRSV(Memphis-37)__AIY60640.1__F-del_DSCav1_mut8 (opt6)
gggagacccgugacccggaaguuguacggcuacgcgacuuucccucccacaaacccucgcgcccuuccuuuccuacuugggcccggcagaaagcuuaccauggaacuacccauacuaaaaacaaacgcaauuacaacaauacuugccgcaguaaccuuaugcuuugccucaucccaaaacauaacagaagaauuuuaucaaucaacaugcuccgcaguaucaaaaggauaccuaggcgcucuaagaacaggaugguacacauccguaaucacaauagaacuauccaauauaaaagaaauaaaauguaauggaacagaugcaaaaguuaaauuaauaaaacaagaacuagacaaauacaaaaacgcaguuaccgaucuccaacuauuaaugcaaucaacaccagcugcaggaaguggaagcgccauagcaagcggaauagcagucugcaaaguauuacaucuugaaggcgaaguaaacaaaaucaaaaaugcccuccucucaacaaacaaagcuguaguaucccuaucaggaugcgguguaucuguucuuacauuuaaaguacucgaucuaaaaaacuacaucgauaaacaguuacuuccaauacucaacaaacaaucauguagcauaccaaacauagaaacaguaauagaauuucaacaaaaaaacaaucgacuacucgaaauaacuagagaauuuucuguaaacgcuggaguaaccacaccagugucuaccuauaugcuuacaaauagcgaacuccuaucacuaaucaaugacaugccaauaacaaaugaccagaaaaaacucaugucaaauaacguacaaauaguacgacaacaaagcuacuccauaaugugcauaaucaaagaagaaguauuagccuacguuguucaacuaccauuauauggaguuauagacacuccaugcuggaaauuacauacaagcccacucuguacaacaaacacaaaagaaggcucaaacauaugcuuaacaagaacagauagaggaugguacugcgauaacgcaggcucagucucauuuuuuccacaagccgaaaccugcaaaguacaaucaaauagaguuuuuugcgacacaaugaacucacucacucuaccaagugaaguaaaucucuguaauaucgacauauucaacccaaaauaugacugcaaaauaaugacaucuaaaaccgauguauccucaagcguaaucacaucauuaggagcuauaguuuccugcuacgguaaaacaaaaugcacagcauccaacaaaugucgcgguaucaucaaaacauucuccaacggaugugauuacguaucaaacaaaggugucgacaccguaagcguaggcaacacuuuauacuauguaaacaaacaagaaggacaaagucuauauguaaaaggagaaccaauaauaaacuucuaugacccccuaguauucccuuccgacgaauuugaugcaagcauuucacaaguuaacgaaaaaaucaaucaaucccuugcuuucauaagaaaaucagacgaauuacuacacaacguaaacguaggaaaaagcacaacaaauaucaugauuacaacaauaauaauuguaauaauaguaauacuccucuuacuuauagcagucggcuuauuccuuuacugcaaagcaagauaaggacuaguacuggcugcaucucccuuuccucuguccuccauccuucucccaggauggugaagggggaccugguacccagugauccccaccccaggauccuaaaucaugacuuaccugcuaauaaaaacucauuggaaaagugagaagaucuaaaaaaaaaaaaaaaaaaaaaaaaaaaaaaaaaaaaaaaaaaaaaaaaaaaaaaaaaaaaaaaaugcaucccccccccccccccccccccccccccccccaaaggcucuuuucagagccaccagaauu

SEQ ID NO: 19779 - RNA, 1926 nt, Artificial Sequence
  mRNA product Design h-1 comprising derived and/or modified sequence from HRSV(Memphis-37)__AIY60640.1__F-del_DSCav1_mut8 (opt11)
gggagacccgugacccggaaguuguacggcuacgcgacuuucccucccacaaacccucgcgcccuuccuuuccuacuugggcccggcagaaagcuuaccauggaacuccccauccuaaaaaccaacgcaaucaccaccauccucgccgccguaacacucugcuuugcaagcucccaaaacaucaccgaagaauuuuaccaaucuaccugcagcgccguaucuaaaggauaccuaggagcccucagaaccgguugguacaccucugucaucacaauagaacucuccaacaucaaagaaaucaaaugcaacggcaccgacgccaaagucaaacucaucaaacaagaacucgacaaauauaaaaacgccguaaccgaccuccaacuccucaugcaauccacccccgccgccggcaguggcuccgcuaucgccuccggaaucgccguuugcaaaguccugcaccuagaaggcgaagucaacaaaaucaaaaacgcccugcucucaaccaacaaagcugucguaagccucuccggcugcggagucuccguccuuaccuucaaaguacucgaccuuaaaaacuacaucgacaaacaacuucuccccauacucaauaaacaauccugcuccauacccaacaucgaaacagucaucgaguuccaacagaaaaauaaccgccuccucgaaauaacccgcgaguucuccgucaacgcaggcgucaccaccccagucuccaccuacaugcugacaaacuccgaacuccuaucccucaucaacgacaugcccaucaccaacgaccaaaagaaacucaugagcaauaacguccaaaucguacgacaacaauccuacagcaucauguguaucaucaaagaagaaguacucgccuacgucguccaacucccacuauacggcgucaucgacacaccaugcuggaaacuucacaccuccccacucugcaccacaaacacaaaagaaggcuccaacaucugccuuacccgaaccgaccgcgggugguacugcgacaacgccggaucagucucguucuuuccccaagccgaaaccugcaaaguacaaucaaaucgcgucuucugcgacaccaugaacuccuuaacacuaccauccgaaguaaaccucugcaacauagacaucuucaacccaaaauacgacugcaaaaucaugaccuccaaaaccgacguauccuccuccguaaucaccagccucggcgcaauagucucaugcuacggcaaaaccaaaugcaccgccuccaacaaaugccgcggcaucauaaaaacuuucucuaacggaugcgacuacgucagcaacaaaggcgucgacaccguauccguagguaauacacuuuacuacgucaauaaacaagaaggccaaucccucuacgucaaaggagaacccaucauaaacuucuacgacccccucgucuuccccuccgacgaguucgacgccuccaucagccaggucaacgaaaagaucaaccaaucacucgccuucauccgcaaaagcgacgaacuccuccacaacguaaacgucggcaaauccacaaccaacauaaugaucaccacuaucaucaucgugauaaucgucauuuuacuucuccucaucgccguaggccucuuccuauacugcaaagcccgcuaaggacuaguacuggcugcaucucccuuuccucuguccuccauccuucucccaggauggugaagggggaccugguacccagugauccccaccccaggauccuaaaucaugacuuaccugcuaauaaaaacucauuggaaaagugagaagaucuaaaaaaaaaaaaaaaaaaaaaaaaaaaaaaaaaaaaaaaaaaaaaaaaaaaaaaaaaaaaaaaaugcaucccccccccccccccccccccccccccccccaaaggcucuuuucagagccaccagaauu

SEQ ID NO: 19780 - RNA, 2142 nt, Artificial Sequence
  mRNA product Design h-2 comprising derived and/or modified sequence from HRSV(Memphis-37)__AIY60640.1__F-del_DSCav1_mut8 (opt1)
gggagacccgugacccggaaguuguacggcuacgcgacuuucccucccacaaacccucgcgcccuuccuuuccuacuugggcccggcagaaagcuuaccauggagcugcccauccucaagaccaacgccaucaccacgauccuggccgcggugacccugugcuucgccagcucccagaacaucaccgaggaguucuaccagagcacgugcuccgccgucagcaagggcuaccucggcgcccugcgcaccgggugguacaccagcgugaucaccaucgagcuguccaacaucaaggagaucaagugcaacggcaccgacgccaaggugaagcucaucaagcaggagcuggacaaguacaagaacgcggucacggaccugcagcuccugaugcagagcaccccggccgccggcuccgggagcgcgaucgccuccggcaucgccgucugcaaggugcugcaccucgagggcgaggugaacaagaucaagaacgcccugcuguccaccaacaaggccgucgugagccucuccggcugcggggugagcguccugaccuucaaggugcuggaccucaagaacuacaucgacaagcagcugcugcccauccugaacaagcagagcugcuccauccccaacaucgagaccgucaucgaguuccagcagaagaacaaccgccuccuggagaucacgcgggaguucagcgugaacgcgggcgugaccacccccgucuccaccuacaugcugacgaacagcgagcuccugucccugaucaacgacaugccgaucaccaacgaccagaagaagcucaugagcaacaacgugcagaucgugcgccagcaguccuacagcaucaugugcaucaucaaggaggagguccuggccuacguggugcagcugccccucuacggggucaucgacacccccugcuggaagcugcacaccagcccccugugcacgaccaacaccaaggagggcuccaacaucugccucacccggacggaccgcgggugguacugcgacaacgccggcagcguguccuucuucccgcaggccgagaccugcaagguccagagcaaccggguguucugcgacaccaugaacucccugacccugcccagcgaggugaaccucugcaacaucgacaucuucaaccccaaguacgacugcaagaucaugacguccaagaccgacgucagcuccagcgugaucaccucccugggcgccaucgugagcugcuacgggaagaccaagugcacggcgagcaacaagugccgcggcaucaucaagaccuucuccaacgggugcgacuacgucagcaacaagggcguggacaccguguccgucggcaacacccuguacuacgugaacaagcaggagggccagagccucuacgugaagggggagcccaucaucaacuucuacgacccgcuggucuuccccuccgacgaguucgacgccagcaucucccaggugaacgagaagaucaaccagagccuggccuucauccggaaguccgacgagcuccugcacaacgugaacgucggcaagagcaccacgaacaucaugaucaccaccaucaucaucgugaucaucgugauccugcugcuccugaucgccgucgggcuguuccucuacugcaaggcccgcugaggacuagugaagggaacacccaaauuuaauucagccuuaagcacaauuaauuaagagugaaacguaauuguacaagcaguuggucacccaccauagggcaugaucaacaccgcaaccuuuccuuuuucccccagugauucugaaaaaccccucuucccuucagcuugcuuagauguuccaaauuuaguaagcuuaaggcggccuacagaagaaaaagaaaaaaaaggccacaaaaguucccucucacuuucaguaaauaaaauaaaagcagcaacagaaauaaagaaauaaaugaaauucaaaaugaaauaaauauuguguugugcagcauuaaaaaaucaauaaaaauuaaaaaugagcaagaucuaaaaaaaaaaaaaaaaaaaaaaaaaaaaaaaaaaaaaaaaaaaaaaaaaaaaaaaaaaaaaaaaugcaucccccccccccccccccccccccccccccccaaaggcucuuuucagagccaccagaauu

SEQ ID NO: 19781 - RNA, 2142 nt, Artificial Sequence
  mRNA product Design h-2 comprising derived and/or modified sequence from HRSV(Memphis-37)__AIY60640.1__F-del_DSCav1_mut8 (opt1)
gggagacccgugacccggaaguuguacggcuacgcgacuuucccucccacaaacccucgcgcccuuccuuuccuacuugggcccggcagaaagcuuaccauggagcugcccauccucaagaccaacgccaucaccacgauccuggccgcggugacccugugcuucgccagcucccagaacaucaccgaggaguucuaccagagcacgugcuccgccgucagcaagggcuaccucggggcccugcgcaccggcugguacaccuccgugaucaccaucgagcugagcaacaucaaggagaucaagugcaacgggaccgacgccaaggugaagcucaucaagcaggagcuggacaaguacaagaacgcggucacggaccugcagcuccugaugcaguccaccccggccgccggcagcggguccgccaucgcgagcggcaucgccgugugcaaggugcugcaccucgagggcgaggucaacaagaucaagaacgcccugcuguccaccaacaaggccguggugagccucuccgggugcggcgucagcgugcugaccuucaaggugcuggaccucaagaacuacaucgacaagcagcugcugcccauccucaacaagcaguccugcagcauccccaacaucgagacggucaucgaguuccagcagaagaacaaccggcugcuggagaucacccgcgaguucuccgugaacgccggggugaccacccccgucagcacguacaugcucaccaacuccgagcugcugagccucaucaacgacaugccgaucaccaacgaccagaagaagcugaugagcaacaacgugcagaucgugcggcagcaguccuacagcaucaugugcaucaucaaggaggagguccuggcguacguggugcagcucccccuguacggcgucaucgacacccccugcuggaagcugcacacgagcccccucugcaccaccaacaccaaggagggguccaacaucugccugacgcgcaccgaccggggcugguacugcgacaacgccggcuccgugagcuucuucccgcaggccgagaccugcaaggugcaguccaaccgcgucuucugcgacaccaugaacagccugacgcuccccuccgaggugaaccugugcaacaucgacaucuucaaccccaaguacgacugcaagaucaugaccagcaagaccgacgucuccagcuccgugaucaccagccugggggccaucguguccugcuacggcaagacgaagugcaccgccagcaacaagugccgggggaucaucaagaccuucuccaacggcugcgacuacgucagcaacaagggcguggacaccguguccgucgggaacacgcucuacuacgugaacaagcaggagggccagagccuguacgugaagggggagcccaucaucaacuucuacgacccgcuggucuuccccagcgacgaguucgacgcguccaucagccaggugaacgagaagaucaaccagucccucgccuucauccgcaagagcgacgagcugcugcacaacgugaacgucggcaaguccaccaccaacaucaugaucaccaccaucaucaucgugaucaucgugauccuccugcugcucaucgccgucgggcuguuccuguacugcaaggcccggugaggacuagugaagggaacacccaaauuuaauucagccuuaagcacaauuaauuaagagugaaacguaauuguacaagcaguuggucacccaccauagggcaugaucaacaccgcaaccuuuccuuuuucccccagugauucugaaaaaccccucuucccuucagcuugcuuagauguuccaaauuuaguaagcuuaaggcggccuacagaagaaaaagaaaaaaaaggccacaaaaguucccucucacuuucaguaaauaaaauaaaagcagcaacagaaauaaagaaauaaaugaaauucaaaaugaaauaaauauuguguugugcagcauuaaaaaaucaauaaaaauuaaaaaugagcaagaucuaaaaaaaaaaaaaaaaaaaaaaaaaaaaaaaaaaaaaaaaaaaaaaaaaaaaaaaaaaaaaaaaugcaucccccccccccccccccccccccccccccccaaaggcucuuuucagagccaccagaauu

SEQ ID NO: 19782 - RNA, 2142 nt, Artificial Sequence
  mRNA product Design h-2 comprising derived and/or modified sequence from HRSV(Memphis-37)__AIY60640.1__F-del_DSCav1_mut8 (opt2)
gggagacccgugacccggaaguuguacggcuacgcgacuuucccucccacaaacccucgcgcccuuccuuuccuacuugggcccggcagaaagcuuaccauggagcuccccauccucaagaccaacgccaucaccaccauccucgccgccgucacccucugcuucgccuccucccagaacaucaccgaggaguucuaccaguccaccugcuccgccgucuccaagggcuaccucggcgcccuccgcaccggcugguacaccuccgucaucaccaucgagcucuccaacaucaaggagaucaagugcaacggcaccgacgccaaggucaagcucaucaagcaggagcucgacaaguacaagaacgccgucaccgaccuccagcuccucaugcaguccacccccgccgccggcuccggcuccgccaucgccuccggcaucgccgucugcaagguccuccaccucgagggcgaggucaacaagaucaagaacgcccuccucuccaccaacaaggccgucgucucccucuccggcugcggcgucuccguccucaccuucaagguccucgaccucaagaacuacaucgacaagcagcuccuccccauccucaacaagcaguccugcuccauccccaacaucgagaccgucaucgaguuccagcagaagaacaaccgccuccucgagaucacccgcgaguucuccgucaacgccggcgucaccacccccgucuccaccuacaugcucaccaacuccgagcuccucucccucaucaacgacaugcccaucaccaacgaccagaagaagcucauguccaacaacguccagaucguccgccagcaguccuacuccaucaugugcaucaucaaggaggagguccucgccuacgucguccagcucccccucuacggcgucaucgacacccccugcuggaagcuccacaccuccccccucugcaccaccaacaccaaggagggcuccaacaucugccucacccgcaccgaccgcggcugguacugcgacaacgccggcuccgucuccuucuucccccaggccgagaccugcaagguccaguccaaccgcgucuucugcgacaccaugaacucccucacccuccccuccgaggucaaccucugcaacaucgacaucuucaaccccaaguacgacugcaagaucaugaccuccaagaccgacgucuccuccuccgucaucaccucccucggcgccaucgucuccugcuacggcaagaccaagugcaccgccuccaacaagugccgcggcaucaucaagaccuucuccaacggcugcgacuacgucuccaacaagggcgucgacaccgucuccgucggcaacacccucuacuacgucaacaagcaggagggccagucccucuacgucaagggcgagcccaucaucaacuucuacgacccccucgucuuccccuccgacgaguucgacgccuccaucucccaggucaacgagaagaucaaccagucccucgccuucauccgcaaguccgacgagcuccuccacaacgucaacgucggcaaguccaccaccaacaucaugaucaccaccaucaucaucgucaucaucgucauccuccuccuccucaucgccgucggccucuuccucuacugcaaggcccgcugaggacuagugaagggaacacccaaauuuaauucagccuuaagcacaauuaauuaagagugaaacguaauuguacaagcaguuggucacccaccauagggcaugaucaacaccgcaaccuuuccuuuuucccccagugauucugaaaaaccccucuucccuucagcuugcuuagauguuccaaauuuaguaagcuuaaggcggccuacagaagaaaaagaaaaaaaaggccacaaaaguucccucucacuuucaguaaauaaaauaaaagcagcaacagaaauaaagaaauaaaugaaauucaaaaugaaauaaauauuguguugugcagcauuaaaaaaucaauaaaaauuaaaaaugagcaagaucuaaaaaaaaaaaaaaaaaaaaaaaaaaaaaaaaaaaaaaaaaaaaaaaaaaaaaaaaaaaaaaaaugcaucccccccccccccccccccccccccccccccaaaggcucuuuucagagccaccagaauu

SEQ ID NO: 19783 - RNA, 2142 nt, Artificial Sequence
  mRNA product Design h-2 comprising derived and/or modified sequence from HRSV(Memphis-37)__AIY60640.1__F-del_DSCav1_mut8 (opt3)
gggagacccgugacccggaaguuguacggcuacgcgacuuucccucccacaaacccucgcgcccuuccuuuccuacuugggcccggcagaaagcuuaccauggagcugcccauccucaagaccaacgccauuacaacuauacuugcugcagugacgcugugcuucgccagcucccagaauaucaccgaagaguuuuaccaaucuacauguucagcggucaguaaaggcuauuugggggcuuuaagaacuggaugguacaccagcguuauuacaaucgaacuguccaacauuaaggagaucaaaugcaaugguaccgacgccaaggugaaacuaauaaagcaggaacucgauaaguauaaaaacgcaguaacugaccugcagcuucugaugcagucuacuccugccgcuggcucggggucagcaaucgccagcggaauugcuguguguaaggucuugcaccucgagggcgaggugaauaaaaucaagaacgcccugcugaguaccaauaaagcgguugugucccucucugguugcggggucagcguguuaacguucaagguacuggaucuuaagaacuacauugacaaacaauugcugccaauccuaaauaagcaguccuguucaauaccgaacauugaaacuguuaucgaguuucagcagaaaaauaacaggcuccuggaaauuacccgggaguucagugugaaugcaggagucacaacucccgugagcaccuauaugcuuacaaacucugagcuguugucccucaucaaugauaugccuaucaccaacgaccaaaagaaacugaugucaaacaaugugcagauuguccgccagcagagcuacaguauaaugugcaucauuaaggaagagguuuuagccuaugugguacaacugccacucuacggcgugaucgauacgcccuguuggaaacuucauacuucuccucugugcacaaccaacacuaaggaaggcuccaauauauguuugacacgaaccgaccgugggugguacugcgauaacgcuggaagcgucucguuuuucccacaggccgagacguguaaggugcagucuaauagaguuuucugcgacaccaugaacucccuaacacugcccucagaagugaaucucugcaacauugauaucuucaauccuaaauaugacuguaagaucaugacaaguaaaaccgaugucagcuccucugugauuacaagccugggugcaaucguaucaugcuacggcaagacuaaauguaccgcuaguaacaagugcagggggauuauaaagacauuuuccaauggaugugacuauguuagcaacaaaggcguggacaccgucucuguggguaauacucuuuacuaugucaacaagcaagaggggcagucacuguacgugaaaggagagccaaucauuaauuucuaugauccguugguuuuucccagugacgaauuugaugccagcaucucccaggugaacgagaagaucaaccagucucucgcguuuauucggaaaucggacgaacuguuacacaauguaaacgucggcaagagcacgacaaauauaaugaucaccacuauuaucauugugaucauaguuauccugcuacuccugauugccgugggccuuuucuuguacugcaaggcacgcugaggacuagugaagggaacacccaaauuuaauucagccuuaagcacaauuaauuaagagugaaacguaauuguacaagcaguuggucacccaccauagggcaugaucaacaccgcaaccuuuccuuuuucccccagugauucugaaaaaccccucuucccuucagcuugcuuagauguuccaaauuuaguaagcuuaaggcggccuacagaagaaaaagaaaaaaaaggccacaaaaguucccucucacuuucaguaaauaaaauaaaagcagcaacagaaauaaagaaauaaaugaaauucaaaaugaaauaaauauuguguugugcagcauuaaaaaaucaauaaaaauuaaaaaugagcaagaucuaaaaaaaaaaaaaaaaaaaaaaaaaaaaaaaaaaaaaaaaaaaaaaaaaaaaaaaaaaaaaaaaugcaucccccccccccccccccccccccccccccccaaaggcucuuuucagagccaccagaauu

SEQ ID NO: 19784 - RNA, 2142 nt, Artificial Sequence
  mRNA product Design h-2 comprising derived and/or modified sequence from HRSV(Memphis-37)__AIY60640.1__F-del_DSCav1_mut8 (opt4)
gggagacccgugacccggaaguuguacggcuacgcgacuuucccucccacaaacccucgcgcccuuccuuuccuacuugggcccggcagaaagcuuaccauggagcugcccauccugaagaccaacgccaucaccaccauccuggccgccgugacccugugcuucgccagcagccagaacaucaccgaggaguucuaccagagcaccugcagcgccgugagcaagggcuaccugggcgcccugagaaccggcugguacaccagcgugaucaccaucgagcugagcaacaucaaggagaucaagugcaacggcaccgacgccaaggugaagcugaucaagcaggagcuggacaaguacaagaacgccgugaccgaccugcagcugcugaugcagagcacccccgccgccggcagcggcagcgccaucgccagcggcaucgccgugugcaaggugcugcaccuggagggcgaggugaacaagaucaagaacgcccugcugagcaccaacaaggccguggugagccugagcggcugcggcgugagcgugcugaccuucaaggugcuggaccugaagaacuacaucgacaagcagcugcugcccauccugaacaagcagagcugcagcauccccaacaucgagaccgugaucgaguuccagcagaagaacaacagacugcuggagaucaccagagaguucagcgugaacgccggcgugaccacccccgugagcaccuacaugcugaccaacagcgagcugcugagccugaucaacgacaugcccaucaccaacgaccagaagaagcugaugagcaacaacgugcagaucgugagacagcagagcuacagcaucaugugcaucaucaaggaggaggugcuggccuacguggugcagcugccccuguacggcgugaucgacacccccugcuggaagcugcacaccagcccccugugcaccaccaacaccaaggagggcagcaacaucugccugaccagaaccgacagaggcugguacugcgacaacgccggcagcgugagcuucuucccccaggccgagaccugcaaggugcagagcaacagaguguucugcgacaccaugaacagccugacccugcccagcgaggugaaccugugcaacaucgacaucuucaaccccaaguacgacugcaagaucaugaccagcaagaccgacgugagcagcagcgugaucaccagccugggcgccaucgugagcugcuacggcaagaccaagugcaccgccagcaacaagugcagaggcaucaucaagaccuucagcaacggcugcgacuacgugagcaacaagggcguggacaccgugagcgugggcaacacccuguacuacgugaacaagcaggagggccagagccuguacgugaagggcgagcccaucaucaacuucuacgacccccugguguuccccagcgacgaguucgacgccagcaucagccaggugaacgagaagaucaaccagagccuggccuucaucagaaagagcgacgagcugcugcacaacgugaacgugggcaagagcaccaccaacaucaugaucaccaccaucaucaucgugaucaucgugauccugcugcugcugaucgccgugggccuguuccuguacugcaaggccagaugaggacuagugaagggaacacccaaauuuaauucagccuuaagcacaauuaauuaagagugaaacguaauuguacaagcaguuggucacccaccauagggcaugaucaacaccgcaaccuuuccuuuuucccccagugauucugaaaaaccccucuucccuucagcuugcuuagauguuccaaauuuaguaagcuuaaggcggccuacagaagaaaaagaaaaaaaaggccacaaaaguucccucucacuuucaguaaauaaaauaaaagcagcaacagaaauaaagaaauaaaugaaauucaaaaugaaauaaauauuguguugugcagcauuaaaaaaucaauaaaaauuaaaaaugagcaagaucuaaaaaaaaaaaaaaaaaaaaaaaaaaaaaaaaaaaaaaaaaaaaaaaaaaaaaaaaaaaaaaaaugcaucccccccccccccccccccccccccccccccaaaggcucuuuucagagccaccagaauu

SEQ ID NO: 19785 - RNA, 2142 nt, Artificial Sequence
  mRNA product Design h-2 comprising derived and/or modified sequence from HRSV(Memphis-37)__AIY60640.1__F-del_DSCav1_mut8 (opt5)
gggagacccgugacccggaaguuguacggcuacgcgacuuucccucccacaaacccucgcgcccuuccuuuccuacuugggcccggcagaaagcuuaccauggagcugcccauccucaagaccaacgccauuacaacgauccuggcugccgugacccuuugcuucgcgagcucccagaauauuacagaagaguuuuaccaaucuaccuguagcgcugucuccaaaggcuaucugggggcccucagaacaggaugguacaccucuguuaucacaauugaacugagcaacaucaaggagaucaaaugcaauggcaccgacgccaaggugaaacuuauuaagcaggaacuggauaaguauaaaaacgcugugacggaccuccagcugcugaugcaguccaccccugccgcugggucuggaagcgccaucgcguccggcauugccgucuguaaggugcuccaccuggagggggagguuaauaaaaucaagaacgcccuucugagcacaaauaaagcuguggucucucucuccggaugcggcgugagcguucugaccuucaaggugcuugaucugaagaacuacauugacaaacaacuccugccgauccugaauaagcagucuuguuccauucccaacaucgaaacagucaucgaguuucagcagaaaaauaaccggcuccuggaaauuacccgcgaguucagcgugaaugcuggcgugacgacaccugucucuaccuauaugcuuacaaacuccgagcugcucagccugaucaaugauaugcccauuaccaacgaccaaaagaaacuuauguccaacaauguucagaucgugagacagcagucuuacagcauuaugugcaucaucaaggaagaggugcuggccuaugucgugcaacucccucuguacgggguuauugauacccccuguuggaaacugcauacauccccucucugcacgaccaacacaaaggaaggaagcaauaucugucugacccggacagaccgcggcugguacugcgauaacgcggggucuguguccuuuuucccgcaggccgagaccuguaagguccagagcaauagaguguuuugcgacacgaugaacucucuuacacugcccagcgaaguuaaucucugcaacauugauaucuucaauccuaaauaugacuguaagauuaugaccuccaaaaccgaugugucuagcuccgucaucacaagccugggagcuaucgugucuugcuacggcaagaccaaauguacagccuccaacaagugccgggggauuaucaagacguuuagcaauggaugugacuaugucucuaacaaaggcguggacaccguuuccgugggcaauacacuuuacuaugucaacaagcaagaggggcagagccuguacgugaaaggagagcccauuaucaauuucuaugauccucucguuuuucccuccgacgaguucgaugcuucuauuagccaggugaacgaaaagaucaaccagucccuggccuuuauucgcaaaucugacgaacugcuccacaaugucaacgugggcaagagcaccacaaauaucaugaucaccacgauuaucauugugaucauuguuauccugcuucugcucaucgccgucgggcuguuccuguacugcaaggcuagaugaggacuagugaagggaacacccaaauuuaauucagccuuaagcacaauuaauuaagagugaaacguaauuguacaagcaguuggucacccaccauagggcaugaucaacaccgcaaccuuuccuuuuucccccagugauucugaaaaaccccucuucccuucagcuugcuuagauguuccaaauuuaguaagcuuaaggcggccuacagaagaaaaagaaaaaaaaggccacaaaaguucccucucacuuucaguaaauaaaauaaaagcagcaacagaaauaaagaaauaaaugaaauucaaaaugaaauaaauauuguguugugcagcauuaaaaaaucaauaaaaauuaaaaaugagcaagaucuaaaaaaaaaaaaaaaaaaaaaaaaaaaaaaaaaaaaaaaaaaaaaaaaaaaaaaaaaaaaaaaaugcaucccccccccccccccccccccccccccccccaaaggcucuuuucagagccaccagaauu

SEQ ID NO: 19786 - RNA, 2142 nt, Artificial Sequence
  mRNA product Design h-2 comprising derived and/or modified sequence from HRSV(Memphis-37)__AIY60640.1__F-del_DSCav1_mut8 (opt6)
gggagacccgugacccggaaguuguacggcuacgcgacuuucccucccacaaacccucgcgcccuuccuuuccuacuugggcccggcagaaagcuuaccauggaacuacccauacuaaaaacaaacgcaauuacaacaauacuugccgcaguaaccuuaugcuuugccucaucccaaaacauaacagaagaauuuuaucaaucaacaugcuccgcaguaucaaaaggauaccuaggcgcucuaagaacaggaugguacacauccguaaucacaauagaacuauccaauauaaaagaaauaaaauguaauggaacagaugcaaaaguuaaauuaauaaaacaagaacuagacaaauacaaaaacgcaguuaccgaucuccaacuauuaaugcaaucaacaccagcugcaggaaguggaagcgccauagcaagcggaauagcagucugcaaaguauuacaucuugaaggcgaaguaaacaaaaucaaaaaugcccuccucucaacaaacaaagcuguaguaucccuaucaggaugcgguguaucuguucuuacauuuaaaguacucgaucuaaaaaacuacaucgauaaacaguuacuuccaauacucaacaaacaaucauguagcauaccaaacauagaaacaguaauagaauuucaacaaaaaaacaaucgacuacucgaaauaacuagagaauuuucuguaaacgcuggaguaaccacaccagugucuaccuauaugcuuacaaauagcgaacuccuaucacuaaucaaugacaugccaauaacaaaugaccagaaaaaacucaugucaaauaacguacaaauaguacgacaacaaagcuacuccauaaugugcauaaucaaagaagaaguauuagccuacguuguucaacuaccauuauauggaguuauagacacuccaugcuggaaauuacauacaagcccacucuguacaacaaacacaaaagaaggcucaaacauaugcuuaacaagaacagauagaggaugguacugcgauaacgcaggcucagucucauuuuuuccacaagccgaaaccugcaaaguacaaucaaauagaguuuuuugcgacacaaugaacucacucacucuaccaagugaaguaaaucucuguaauaucgacauauucaacccaaaauaugacugcaaaauaaugacaucuaaaaccgauguauccucaagcguaaucacaucauuaggagcuauaguuuccugcuacgguaaaacaaaaugcacagcauccaacaaaugucgcgguaucaucaaaacauucuccaacggaugugauuacguaucaaacaaaggugucgacaccguaagcguaggcaacacuuuauacuauguaaacaaacaagaaggacaaagucuauauguaaaaggagaaccaauaauaaacuucuaugacccccuaguauucccuuccgacgaauuugaugcaagcauuucacaaguuaacgaaaaaaucaaucaaucccuugcuuucauaagaaaaucagacgaauuacuacacaacguaaacguaggaaaaagcacaacaaauaucaugauuacaacaauaauaauuguaauaauaguaauacuccucuuacuuauagcagucggcuuauuccuuuacugcaaagcaagauaaggacuagugaagggaacacccaaauuuaauucagccuuaagcacaauuaauuaagagugaaacguaauuguacaagcaguuggucacccaccauagggcaugaucaacaccgcaaccuuuccuuuuucccccagugauucugaaaaaccccucuucccuucagcuugcuuagauguuccaaauuuaguaagcuuaaggcggccuacagaagaaaaagaaaaaaaaggccacaaaaguucccucucacuuucaguaaauaaaauaaaagcagcaacagaaauaaagaaauaaaugaaauucaaaaugaaauaaauauuguguugugcagcauuaaaaaaucaauaaaaauuaaaaaugagcaagaucuaaaaaaaaaaaaaaaaaaaaaaaaaaaaaaaaaaaaaaaaaaaaaaaaaaaaaaaaaaaaaaaaugcaucccccccccccccccccccccccccccccccaaaggcucuuuucagagccaccagaauu

SEQ ID NO: 19787 - RNA, 2142 nt, Artificial Sequence
  mRNA product Design h-2 comprising derived and/or modified sequence from HRSV(Memphis-37)__AIY60640.1__F-del_DSCav1_mut8 (opt11)
gggagacccgugacccggaaguuguacggcuacgcgacuuucccucccacaaacccucgcgcccuuccuuuccuacuugggcccggcagaaagcuuaccauggaacuccccauccuaaaaaccaacgcaaucaccaccauccucgccgccguaacacucugcuuugcaagcucccaaaacaucaccgaagaauuuuaccaaucuaccugcagcgccguaucuaaaggauaccuaggagcccucagaaccgguugguacaccucugucaucacaauagaacucuccaacaucaaagaaaucaaaugcaacggcaccgacgccaaagucaaacucaucaaacaagaacucgacaaauauaaaaacgccguaaccgaccuccaacuccucaugcaauccacccccgccgccggcaguggcuccgcuaucgccuccggaaucgccguuugcaaaguccugcaccuagaaggcgaagucaacaaaaucaaaaacgcccugcucucaaccaacaaagcugucguaagccucuccggcugcggagucuccguccuuaccuucaaaguacucgaccuuaaaaacuacaucgacaaacaacuucuccccauacucaauaaacaauccugcuccauacccaacaucgaaacagucaucgaguuccaacagaaaaauaaccgccuccucgaaauaacccgcgaguucuccgucaacgcaggcgucaccaccccagucuccaccuacaugcugacaaacuccgaacuccuaucccucaucaacgacaugcccaucaccaacgaccaaaagaaacucaugagcaauaacguccaaaucguacgacaacaauccuacagcaucauguguaucaucaaagaagaaguacucgccuacgucguccaacucccacuauacggcgucaucgacacaccaugcuggaaacuucacaccuccccacucugcaccacaaacacaaaagaaggcuccaacaucugccuuacccgaaccgaccgcgggugguacugcgacaacgccggaucagucucguucuuuccccaagccgaaaccugcaaaguacaaucaaaucgcgucuucugcgacaccaugaacuccuuaacacuaccauccgaaguaaaccucugcaacauagacaucuucaacccaaaauacgacugcaaaaucaugaccuccaaaaccgacguauccuccuccguaaucaccagccucggcgcaauagucucaugcuacggcaaaaccaaaugcaccgccuccaacaaaugccgcggcaucauaaaaacuuucucuaacggaugcgacuacgucagcaacaaaggcgucgacaccguauccguagguaauacacuuuacuacgucaauaaacaagaaggccaaucccucuacgucaaaggagaacccaucauaaacuucuacgacccccucgucuuccccuccgacgaguucgacgccuccaucagccaggucaacgaaaagaucaaccaaucacucgccuucauccgcaaaagcgacgaacuccuccacaacguaaacgucggcaaauccacaaccaacauaaugaucaccacuaucaucaucgugauaaucgucauuuuacuucuccucaucgccguaggccucuuccuauacugcaaagcccgcuaaggacuagugaagggaacacccaaauuuaauucagccuuaagcacaauuaauuaagagugaaacguaauuguacaagcaguuggucacccaccauagggcaugaucaacaccgcaaccuuuccuuuuucccccagugauucugaaaaaccccucuucccuucagcuugcuuagauguuccaaauuuaguaagcuuaaggcggccuacagaagaaaaagaaaaaaaaggccacaaaaguucccucucacuuucaguaaauaaaauaaaagcagcaacagaaauaaagaaauaaaugaaauucaaaaugaaauaaauauuguguugugcagcauuaaaaaaucaauaaaaauuaaaaaugagcaagaucuaaaaaaaaaaaaaaaaaaaaaaaaaaaaaaaaaaaaaaaaaaaaaaaaaaaaaaaaaaaaaaaaugcaucccccccccccccccccccccccccccccccaaaggcucuuuucagagccaccagaauu

SEQ ID NO: 19788 - RNA, 1922 nt, Artificial Sequence
  mRNA product Design h-3 comprising derived and/or modified sequence from HRSV(Memphis-37)__AIY60640.1__F-del_DSCav1_mut8 (opt1)
gggagacccgugacccggaaguuguacggcuacgcgacuuucccucccacaaacccucgcgcccuuccuuuccuacuugggcccggcagaaagcuuaccauggagcugcccauccucaagaccaacgccaucaccacgauccuggccgcggugacccugugcuucgccagcucccagaacaucaccgaggaguucuaccagagcacgugcuccgccgucagcaagggcuaccucggcgcccugcgcaccgggugguacaccagcgugaucaccaucgagcuguccaacaucaaggagaucaagugcaacggcaccgacgccaaggugaagcucaucaagcaggagcuggacaaguacaagaacgcggucacggaccugcagcuccugaugcagagcaccccggccgccggcuccgggagcgcgaucgccuccggcaucgccgucugcaaggugcugcaccucgagggcgaggugaacaagaucaagaacgcccugcuguccaccaacaaggccgucgugagccucuccggcugcggggugagcguccugaccuucaaggugcuggaccucaagaacuacaucgacaagcagcugcugcccauccugaacaagcagagcugcuccauccccaacaucgagaccgucaucgaguuccagcagaagaacaaccgccuccuggagaucacgcgggaguucagcgugaacgcgggcgugaccacccccgucuccaccuacaugcugacgaacagcgagcuccugucccugaucaacgacaugccgaucaccaacgaccagaagaagcucaugagcaacaacgugcagaucgugcgccagcaguccuacagcaucaugugcaucaucaaggaggagguccuggccuacguggugcagcugccccucuacggggucaucgacacccccugcuggaagcugcacaccagcccccugugcacgaccaacaccaaggagggcuccaacaucugccucacccggacggaccgcgggugguacugcgacaacgccggcagcguguccuucuucccgcaggccgagaccugcaagguccagagcaaccggguguucugcgacaccaugaacucccugacccugcccagcgaggugaaccucugcaacaucgacaucuucaaccccaaguacgacugcaagaucaugacguccaagaccgacgucagcuccagcgugaucaccucccugggcgccaucgugagcugcuacgggaagaccaagugcacggcgagcaacaagugccgcggcaucaucaagaccuucuccaacgggugcgacuacgucagcaacaagggcguggacaccguguccgucggcaacacccuguacuacgugaacaagcaggagggccagagccucuacgugaagggggagcccaucaucaacuucuacgacccgcuggucuuccccuccgacgaguucgacgccagcaucucccaggugaacgagaagaucaaccagagccuggccuucauccggaaguccgacgagcuccugcacaacgugaacgucggcaagagcaccacgaacaucaugaucaccaccaucaucaucgugaucaucgugauccugcugcuccugaucgccgucgggcuguuccucuacugcaaggcccgcugaggacuaguggaagcauuuuccuggcugauuaaaagaaauuacucagcuauggucaucuguuccuguuagaaggcuaugcagcauauuauauacuaugcgcauguuaugaaaugcauaauaaaaaauuuuaaaaaaucuaaaagaucuaaaaaaaaaaaaaaaaaaaaaaaaaaaaaaaaaaaaaaaaaaaaaaaaaaaaaaaaaaaaaaaaugcaucccccccccccccccccccccccccccccccaaaggcucuuuucagagccaccagaauu

SEQ ID NO: 19789 - RNA, 1922 nt, Artificial Sequence
  mRNA product Design h-3 comprising derived and/or modified sequence from HRSV(Memphis-37)__AIY60640.1__F-del_DSCav1_mut8 (opt1)
gggagacccgugacccggaaguuguacggcuacgcgacuuucccucccacaaacccucgcgcccuuccuuuccuacuugggcccggcagaaagcuuaccauggagcugcccauccucaagaccaacgccaucaccacgauccuggccgcggugacccugugcuucgccagcucccagaacaucaccgaggaguucuaccagagcacgugcuccgccgucagcaagggcuaccucggggcccugcgcaccggcugguacaccuccgugaucaccaucgagcugagcaacaucaaggagaucaagugcaacgggaccgacgccaaggugaagcucaucaagcaggagcuggacaaguacaagaacgcggucacggaccugcagcuccugaugcaguccaccccggccgccggcagcggguccgccaucgcgagcggcaucgccgugugcaaggugcugcaccucgagggcgaggucaacaagaucaagaacgcccugcuguccaccaacaaggccguggugagccucuccgggugcggcgucagcgugcugaccuucaaggugcuggaccucaagaacuacaucgacaagcagcugcugcccauccucaacaagcaguccugcagcauccccaacaucgagacggucaucgaguuccagcagaagaacaaccggcugcuggagaucacccgcgaguucuccgugaacgccggggugaccacccccgucagcacguacaugcucaccaacuccgagcugcugagccucaucaacgacaugccgaucaccaacgaccagaagaagcugaugagcaacaacgugcagaucgugcggcagcaguccuacagcaucaugugcaucaucaaggaggagguccuggcguacguggugcagcucccccuguacggcgucaucgacacccccugcuggaagcugcacacgagcccccucugcaccaccaacaccaaggagggguccaacaucugccugacgcgcaccgaccggggcugguacugcgacaacgccggcuccgugagcuucuucccgcaggccgagaccugcaaggugcaguccaaccgcgucuucugcgacaccaugaacagccugacgcuccccuccgaggugaaccugugcaacaucgacaucuucaaccccaaguacgacugcaagaucaugaccagcaagaccgacgucuccagcuccgugaucaccagccugggggccaucguguccugcuacggcaagacgaagugcaccgccagcaacaagugccgggggaucaucaagaccuucuccaacggcugcgacuacgucagcaacaagggcguggacaccguguccgucgggaacacgcucuacuacgugaacaagcaggagggccagagccuguacgugaagggggagcccaucaucaacuucuacgacccgcuggucuuccccagcgacgaguucgacgcguccaucagccaggugaacgagaagaucaaccagucccucgccuucauccgcaagagcgacgagcugcugcacaacgugaacgucggcaaguccaccaccaacaucaugaucaccaccaucaucaucgugaucaucgugauccuccugcugcucaucgccgucgggcuguuccuguacugcaaggcccggugaggacuaguggaagcauuuuccuggcugauuaaaagaaauuacucagcuauggucaucuguuccuguuagaaggcuaugcagcauauuauauacuaugcgcauguuaugaaaugcauaauaaaaaauuuuaaaaaaucuaaaagaucuaaaaaaaaaaaaaaaaaaaaaaaaaaaaaaaaaaaaaaaaaaaaaaaaaaaaaaaaaaaaaaaaugcaucccccccccccccccccccccccccccccccaaaggcucuuuucagagccaccagaauu

SEQ ID NO: 19790 - RNA, 1922 nt, Artificial Sequence
  mRNA product Design h-3 comprising derived and/or modified sequence from HRSV(Memphis-37)__AIY60640.1__F-del_DSCav1_mut8 (opt2)
gggagacccgugacccggaaguuguacggcuacgcgacuuucccucccacaaacccucgcgcccuuccuuuccuacuugggcccggcagaaagcuuaccauggagcuccccauccucaagaccaacgccaucaccaccauccucgccgccgucacccucugcuucgccuccucccagaacaucaccgaggaguucuaccaguccaccugcuccgccgucuccaagggcuaccucggcgcccuccgcaccggcugguacaccuccgucaucaccaucgagcucuccaacaucaaggagaucaagugcaacggcaccgacgccaaggucaagcucaucaagcaggagcucgacaaguacaagaacgccgucaccgaccuccagcuccucaugcaguccacccccgccgccggcuccggcuccgccaucgccuccggcaucgccgucugcaagguccuccaccucgagggcgaggucaacaagaucaagaacgcccuccucuccaccaacaaggccgucgucucccucuccggcugcggcgucuccguccucaccuucaagguccucgaccucaagaacuacaucgacaagcagcuccuccccauccucaacaagcaguccugcuccauccccaacaucgagaccgucaucgaguuccagcagaagaacaaccgccuccucgagaucacccgcgaguucuccgucaacgccggcgucaccacccccgucuccaccuacaugcucaccaacuccgagcuccucucccucaucaacgacaugcccaucaccaacgaccagaagaagcucauguccaacaacguccagaucguccgccagcaguccuacuccaucaugugcaucaucaaggaggagguccucgccuacgucguccagcucccccucuacggcgucaucgacacccccugcuggaagcuccacaccuccccccucugcaccaccaacaccaaggagggcuccaacaucugccucacccgcaccgaccgcggcugguacugcgacaacgccggcuccgucuccuucuucccccaggccgagaccugcaagguccaguccaaccgcgucuucugcgacaccaugaacucccucacccuccccuccgaggucaaccucugcaacaucgacaucuucaaccccaaguacgacugcaagaucaugaccuccaagaccgacgucuccuccuccgucaucaccucccucggcgccaucgucuccugcuacggcaagaccaagugcaccgccuccaacaagugccgcggcaucaucaagaccuucuccaacggcugcgacuacgucuccaacaagggcgucgacaccgucuccgucggcaacacccucuacuacgucaacaagcaggagggccagucccucuacgucaagggcgagcccaucaucaacuucuacgacccccucgucuuccccuccgacgaguucgacgccuccaucucccaggucaacgagaagaucaaccagucccucgccuucauccgcaaguccgacgagcuccuccacaacgucaacgucggcaaguccaccaccaacaucaugaucaccaccaucaucaucgucaucaucgucauccuccuccuccucaucgccgucggccucuuccucuacugcaaggcccgcugaggacuaguggaagcauuuuccuggcugauuaaaagaaauuacucagcuauggucaucuguuccuguuagaaggcuaugcagcauauuauauacuaugcgcauguuaugaaaugcauaauaaaaaauuuuaaaaaaucuaaaagaucuaaaaaaaaaaaaaaaaaaaaaaaaaaaaaaaaaaaaaaaaaaaaaaaaaaaaaaaaaaaaaaaaugcaucccccccccccccccccccccccccccccccaaaggcucuuuucagagccaccagaauu

SEQ ID NO: 19791 - RNA, 1922 nt, Artificial Sequence
  mRNA product Design h-3 comprising derived and/or modified sequence from HRSV(Memphis-37)__AIY60640.1__F-del_DSCav1_mut8 (opt3)
gggagacccgugacccggaaguuguacggcuacgcgacuuucccucccacaaacccucgcgcccuuccuuuccuacuugggcccggcagaaagcuuaccauggagcugcccauccucaagaccaacgccauuacaacuauacuugcugcagugacgcugugcuucgccagcucccagaauaucaccgaagaguuuuaccaaucuacauguucagcggucaguaaaggcuauuugggggcuuuaagaacuggaugguacaccagcguuauuacaaucgaacuguccaacauuaaggagaucaaaugcaaugguaccgacgccaaggugaaacuaauaaagcaggaacucgauaaguauaaaaacgcaguaacugaccugcagcuucugaugcagucuacuccugccgcuggcucggggucagcaaucgccagcggaauugcuguguguaaggucuugcaccucgagggcgaggugaauaaaaucaagaacgcccugcugaguaccaauaaagcgguugugucccucucugguugcggggucagcguguuaacguucaagguacuggaucuuaagaacuacauugacaaacaauugcugccaauccuaaauaagcaguccuguucaauaccgaacauugaaacuguuaucgaguuucagcagaaaaauaacaggcuccuggaaauuacccgggaguucagugugaaugcaggagucacaacucccgugagcaccuauaugcuuacaaacucugagcuguugucccucaucaaugauaugccuaucaccaacgaccaaaagaaacugaugucaaacaaugugcagauuguccgccagcagagcuacaguauaaugugcaucauuaaggaagagguuuuagccuaugugguacaacugccacucuacggcgugaucgauacgcccuguuggaaacuucauacuucuccucugugcacaaccaacacuaaggaaggcuccaauauauguuugacacgaaccgaccgugggugguacugcgauaacgcuggaagcgucucguuuuucccacaggccgagacguguaaggugcagucuaauagaguuuucugcgacaccaugaacucccuaacacugcccucagaagugaaucucugcaacauugauaucuucaauccuaaauaugacuguaagaucaugacaaguaaaaccgaugucagcuccucugugauuacaagccugggugcaaucguaucaugcuacggcaagacuaaauguaccgcuaguaacaagugcagggggauuauaaagacauuuuccaauggaugugacuauguuagcaacaaaggcguggacaccgucucuguggguaauacucuuuacuaugucaacaagcaagaggggcagucacuguacgugaaaggagagccaaucauuaauuucuaugauccguugguuuuucccagugacgaauuugaugccagcaucucccaggugaacgagaagaucaaccagucucucgcguuuauucggaaaucggacgaacuguuacacaauguaaacgucggcaagagcacgacaaauauaaugaucaccacuauuaucauugugaucauaguuauccugcuacuccugauugccgugggccuuuucuuguacugcaaggcacgcugaggacuaguggaagcauuuuccuggcugauuaaaagaaauuacucagcuauggucaucuguuccuguuagaaggcuaugcagcauauuauauacuaugcgcauguuaugaaaugcauaauaaaaaauuuuaaaaaaucuaaaagaucuaaaaaaaaaaaaaaaaaaaaaaaaaaaaaaaaaaaaaaaaaaaaaaaaaaaaaaaaaaaaaaaaugcaucccccccccccccccccccccccccccccccaaaggcucuuuucagagccaccagaauu

SEQ ID NO: 19792 - RNA, 1922 nt, Artificial Sequence
  mRNA product Design h-3 comprising derived and/or modified sequence from HRSV(Memphis-37)__AIY60640.1__F-del_DSCav1_mut8 (opt4)
gggagacccgugacccggaaguuguacggcuacgcgacuuucccucccacaaacccucgcgcccuuccuuuccuacuugggcccggcagaaagcuuaccauggagcugcccauccugaagaccaacgccaucaccaccauccuggccgccgugacccugugcuucgccagcagccagaacaucaccgaggaguucuaccagagcaccugcagcgccgugagcaagggcuaccugggcgcccugagaaccggcugguacaccagcgugaucaccaucgagcugagcaacaucaaggagaucaagugcaacggcaccgacgccaaggugaagcugaucaagcaggagcuggacaaguacaagaacgccgugaccgaccugcagcugcugaugcagagcacccccgccgccggcagcggcagcgccaucgccagcggcaucgccgugugcaaggugcugcaccuggagggcgaggugaacaagaucaagaacgcccugcugagcaccaacaaggccguggugagccugagcggcugcggcgugagcgugcugaccuucaaggugcuggaccugaagaacuacaucgacaagcagcugcugcccauccugaacaagcagagcugcagcauccccaacaucgagaccgugaucgaguuccagcagaagaacaacagacugcuggagaucaccagagaguucagcgugaacgccggcgugaccacccccgugagcaccuacaugcugaccaacagcgagcugcugagccugaucaacgacaugcccaucaccaacgaccagaagaagcugaugagcaacaacgugcagaucgugagacagcagagcuacagcaucaugugcaucaucaaggaggaggugcuggccuacguggugcagcugccccuguacggcgugaucgacacccccugcuggaagcugcacaccagcccccugugcaccaccaacaccaaggagggcagcaacaucugccugaccagaaccgacagaggcugguacugcgacaacgccggcagcgugagcuucuucccccaggccgagaccugcaaggugcagagcaacagaguguucugcgacaccaugaacagccugacccugcccagcgaggugaaccugugcaacaucgacaucuucaaccccaaguacgacugcaagaucaugaccagcaagaccgacgugagcagcagcgugaucaccagccugggcgccaucgugagcugcuacggcaagaccaagugcaccgccagcaacaagugcagaggcaucaucaagaccuucagcaacggcugcgacuacgugagcaacaagggcguggacaccgugagcgugggcaacacccuguacuacgugaacaagcaggagggccagagccuguacgugaagggcgagcccaucaucaacuucuacgacccccugguguuccccagcgacgaguucgacgccagcaucagccaggugaacgagaagaucaaccagagccuggccuucaucagaaagagcgacgagcugcugcacaacgugaacgugggcaagagcaccaccaacaucaugaucaccaccaucaucaucgugaucaucgugauccugcugcugcugaucgccgugggccuguuccuguacugcaaggccagaugaggacuaguggaagcauuuuccuggcugauuaaaagaaauuacucagcuauggucaucuguuccuguuagaaggcuaugcagcauauuauauacuaugcgcauguuaugaaaugcauaauaaaaaauuuuaaaaaaucuaaaagaucuaaaaaaaaaaaaaaaaaaaaaaaaaaaaaaaaaaaaaaaaaaaaaaaaaaaaaaaaaaaaaaaaugcaucccccccccccccccccccccccccccccccaaaggcucuuuucagagccaccagaauu

SEQ ID NO: 19793 - RNA, 1922 nt, Artificial Sequence
  mRNA product Design h-3 comprising derived and/or modified sequence from HRSV(Memphis-37)__AIY60640.1__F-del_DSCav1_mut8 (opt5)
gggagacccgugacccggaaguuguacggcuacgcgacuuucccucccacaaacccucgcgcccuuccuuuccuacuugggcccggcagaaagcuuaccauggagcugcccauccucaagaccaacgccauuacaacgauccuggcugccgugacccuuugcuucgcgagcucccagaauauuacagaagaguuuuaccaaucuaccuguagcgcugucuccaaaggcuaucugggggcccucagaacaggaugguacaccucuguuaucacaauugaacugagcaacaucaaggagaucaaaugcaauggcaccgacgccaaggugaaacuuauuaagcaggaacuggauaaguauaaaaacgcugugacggaccuccagcugcugaugcaguccaccccugccgcugggucuggaagcgccaucgcguccggcauugccgucuguaaggugcuccaccuggagggggagguuaauaaaaucaagaacgcccuucugagcacaaauaaagcuguggucucucucuccggaugcggcgugagcguucugaccuucaaggugcuugaucugaagaacuacauugacaaacaacuccugccgauccugaauaagcagucuuguuccauucccaacaucgaaacagucaucgaguuucagcagaaaaauaaccggcuccuggaaauuacccgcgaguucagcgugaaugcuggcgugacgacaccugucucuaccuauaugcuuacaaacuccgagcugcucagccugaucaaugauaugcccauuaccaacgaccaaaagaaacuuauguccaacaauguucagaucgugagacagcagucuuacagcauuaugugcaucaucaaggaagaggugcuggccuaugucgugcaacucccucuguacgggguuauugauacccccuguuggaaacugcauacauccccucucugcacgaccaacacaaaggaaggaagcaauaucugucugacccggacagaccgcggcugguacugcgauaacgcggggucuguguccuuuuucccgcaggccgagaccuguaagguccagagcaauagaguguuuugcgacacgaugaacucucuuacacugcccagcgaaguuaaucucugcaacauugauaucuucaauccuaaauaugacuguaagauuaugaccuccaaaaccgaugugucuagcuccgucaucacaagccugggagcuaucgugucuugcuacggcaagaccaaauguacagccuccaacaagugccgggggauuaucaagacguuuagcaauggaugugacuaugucucuaacaaaggcguggacaccguuuccgugggcaauacacuuuacuaugucaacaagcaagaggggcagagccuguacgugaaaggagagcccauuaucaauuucuaugauccucucguuuuucccuccgacgaguucgaugcuucuauuagccaggugaacgaaaagaucaaccagucccuggccuuuauucgcaaaucugacgaacugcuccacaaugucaacgugggcaagagcaccacaaauaucaugaucaccacgauuaucauugugaucauuguuauccugcuucugcucaucgccgucgggcuguuccuguacugcaaggcuagaugaggacuaguggaagcauuuuccuggcugauuaaaagaaauuacucagcuauggucaucuguuccuguuagaaggcuaugcagcauauuauauacuaugcgcauguuaugaaaugcauaauaaaaaauuuuaaaaaaucuaaaagaucuaaaaaaaaaaaaaaaaaaaaaaaaaaaaaaaaaaaaaaaaaaaaaaaaaaaaaaaaaaaaaaaaugcaucccccccccccccccccccccccccccccccaaaggcucuuuucagagccaccagaauu

SEQ ID NO: 19794 - RNA, 1922 nt, Artificial Sequence
  mRNA product Design h-3 comprising derived and/or modified sequence from HRSV(Memphis-37)__AIY60640.1__F-del_DSCav1_mut8 (opt6)
gggagacccgugacccggaaguuguacggcuacgcgacuuucccucccacaaacccucgcgcccuuccuuuccuacuugggcccggcagaaagcuuaccauggaacuacccauacuaaaaacaaacgcaauuacaacaauacuugccgcaguaaccuuaugcuuugccucaucccaaaacauaacagaagaauuuuaucaaucaacaugcuccgcaguaucaaaaggauaccuaggcgcucuaagaacaggaugguacacauccguaaucacaauagaacuauccaauauaaaagaaauaaaauguaauggaacagaugcaaaaguuaaauuaauaaaacaagaacuagacaaauacaaaaacgcaguuaccgaucuccaacuauuaaugcaaucaacaccagcugcaggaaguggaagcgccauagcaagcggaauagcagucugcaaaguauuacaucuugaaggcgaaguaaacaaaaucaaaaaugcccuccucucaacaaacaaagcuguaguaucccuaucaggaugcgguguaucuguucuuacauuuaaaguacucgaucuaaaaaacuacaucgauaaacaguuacuuccaauacucaacaaacaaucauguagcauaccaaacauagaaacaguaauagaauuucaacaaaaaaacaaucgacuacucgaaauaacuagagaauuuucuguaaacgcuggaguaaccacaccagugucuaccuauaugcuuacaaauagcgaacuccuaucacuaaucaaugacaugccaauaacaaaugaccagaaaaaacucaugucaaauaacguacaaauaguacgacaacaaagcuacuccauaaugugcauaaucaaagaagaaguauuagccuacguuguucaacuaccauuauauggaguuauagacacuccaugcuggaaauuacauacaagcccacucuguacaacaaacacaaaagaaggcucaaacauaugcuuaacaagaacagauagaggaugguacugcgauaacgcaggcucagucucauuuuuuccacaagccgaaaccugcaaaguacaaucaaauagaguuuuuugcgacacaaugaacucacucacucuaccaagugaaguaaaucucuguaauaucgacauauucaacccaaaauaugacugcaaaauaaugacaucuaaaaccgauguauccucaagcguaaucacaucauuaggagcuauaguuuccugcuacgguaaaacaaaaugcacagcauccaacaaaugucgcgguaucaucaaaacauucuccaacggaugugauuacguaucaaacaaaggugucgacaccguaagcguaggcaacacuuuauacuauguaaacaaacaagaaggacaaagucuauauguaaaaggagaaccaauaauaaacuucuaugacccccuaguauucccuuccgacgaauuugaugcaagcauuucacaaguuaacgaaaaaaucaaucaaucccuugcuuucauaagaaaaucagacgaauuacuacacaacguaaacguaggaaaaagcacaacaaauaucaugauuacaacaauaauaauuguaauaauaguaauacuccucuuacuuauagcagucggcuuauuccuuuacugcaaagcaagauaaggacuaguggaagcauuuuccuggcugauuaaaagaaauuacucagcuauggucaucuguuccuguuagaaggcuaugcagcauauuauauacuaugcgcauguuaugaaaugcauaauaaaaaauuuuaaaaaaucuaaaagaucuaaaaaaaaaaaaaaaaaaaaaaaaaaaaaaaaaaaaaaaaaaaaaaaaaaaaaaaaaaaaaaaaugcaucccccccccccccccccccccccccccccccaaaggcucuuuucagagccaccagaauu

SEQ ID NO: 19795 - RNA, 1922 nt, Artificial Sequence
  mRNA product Design h-3 comprising derived and/or modified sequence from HRSV(Memphis-37)__AIY60640.1__F-del_DSCav1_mut8 (opt11)
gggagacccgugacccggaaguuguacggcuacgcgacuuucccucccacaaacccucgcgcccuuccuuuccuacuugggcccggcagaaagcuuaccauggaacuccccauccuaaaaaccaacgcaaucaccaccauccucgccgccguaacacucugcuuugcaagcucccaaaacaucaccgaagaauuuuaccaaucuaccugcagcgccguaucuaaaggauaccuaggagcccucagaaccgguugguacaccucugucaucacaauagaacucuccaacaucaaagaaaucaaaugcaacggcaccgacgccaaagucaaacucaucaaacaagaacucgacaaauauaaaaacgccguaaccgaccuccaacuccucaugcaauccacccccgccgccggcaguggcuccgcuaucgccuccggaaucgccguuugcaaaguccugcaccuagaaggcgaagucaacaaaaucaaaaacgcccugcucucaaccaacaaagcugucguaagccucuccggcugcggagucuccguccuuaccuucaaaguacucgaccuuaaaaacuacaucgacaaacaacuucuccccauacucaauaaacaauccugcuccauacccaacaucgaaacagucaucgaguuccaacagaaaaauaaccgccuccucgaaauaacccgcgaguucuccgucaacgcaggcgucaccaccccagucuccaccuacaugcugacaaacuccgaacuccuaucccucaucaacgacaugcccaucaccaacgaccaaaagaaacucaugagcaauaacguccaaaucguacgacaacaauccuacagcaucauguguaucaucaaagaagaaguacucgccuacgucguccaacucccacuauacggcgucaucgacacaccaugcuggaaacuucacaccuccccacucugcaccacaaacacaaaagaaggcuccaacaucugccuuacccgaaccgaccgcgggugguacugcgacaacgccggaucagucucguucuuuccccaagccgaaaccugcaaaguacaaucaaaucgcgucuucugcgacaccaugaacuccuuaacacuaccauccgaaguaaaccucugcaacauagacaucuucaacccaaaauacgacugcaaaaucaugaccuccaaaaccgacguauccuccuccguaaucaccagccucggcgcaauagucucaugcuacggcaaaaccaaaugcaccgccuccaacaaaugccgcggcaucauaaaaacuuucucuaacggaugcgacuacgucagcaacaaaggcgucgacaccguauccguagguaauacacuuuacuacgucaauaaacaagaaggccaaucccucuacgucaaaggagaacccaucauaaacuucuacgacccccucgucuuccccuccgacgaguucgacgccuccaucagccaggucaacgaaaagaucaaccaaucacucgccuucauccgcaaaagcgacgaacuccuccacaacguaaacgucggcaaauccacaaccaacauaaugaucaccacuaucaucaucgugauaaucgucauuuuacuucuccucaucgccguaggccucuuccuauacugcaaagcccgcuaaggacuaguggaagcauuuuccuggcugauuaaaagaaauuacucagcuauggucaucuguuccuguuagaaggcuaugcagcauauuauauacuaugcgcauguuaugaaaugcauaauaaaaaauuuuaaaaaaucuaaaagaucuaaaaaaaaaaaaaaaaaaaaaaaaaaaaaaaaaaaaaaaaaaaaaaaaaaaaaaaaaaaaaaaaugcaucccccccccccccccccccccccccccccccaaaggcucuuuucagagccaccagaauu

SEQ ID NO: 19796 - RNA, 1985 nt, Artificial Sequence
  mRNA product Design h-4 comprising derived and/or modified sequence from HRSV(Memphis-37)__AIY60640.1__F-del_DSCav1_mut8 (opt1)
gggagagggcgcuuggcuugcaaggacccugagcugcggcauugaagcacacccaacccaacucgacugaagucagccucacugaaccggaucugagaaucuucucucucugggcuugccagggcucuccgaaccuagcuagcauccucuucaauuccaacuagaaagcuuaccauggagcugcccauccucaagaccaacgccaucaccacgauccuggccgcggugacccugugcuucgccagcucccagaacaucaccgaggaguucuaccagagcacgugcuccgccgucagcaagggcuaccucggcgcccugcgcaccgggugguacaccagcgugaucaccaucgagcuguccaacaucaaggagaucaagugcaacggcaccgacgccaaggugaagcucaucaagcaggagcuggacaaguacaagaacgcggucacggaccugcagcuccugaugcagagcaccccggccgccggcuccgggagcgcgaucgccuccggcaucgccgucugcaaggugcugcaccucgagggcgaggugaacaagaucaagaacgcccugcuguccaccaacaaggccgucgugagccucuccggcugcggggugagcguccugaccuucaaggugcuggaccucaagaacuacaucgacaagcagcugcugcccauccugaacaagcagagcugcuccauccccaacaucgagaccgucaucgaguuccagcagaagaacaaccgccuccuggagaucacgcgggaguucagcgugaacgcgggcgugaccacccccgucuccaccuacaugcugacgaacagcgagcuccugucccugaucaacgacaugccgaucaccaacgaccagaagaagcucaugagcaacaacgugcagaucgugcgccagcaguccuacagcaucaugugcaucaucaaggaggagguccuggccuacguggugcagcugccccucuacggggucaucgacacccccugcuggaagcugcacaccagcccccugugcacgaccaacaccaaggagggcuccaacaucugccucacccggacggaccgcgggugguacugcgacaacgccggcagcguguccuucuucccgcaggccgagaccugcaagguccagagcaaccggguguucugcgacaccaugaacucccugacccugcccagcgaggugaaccucugcaacaucgacaucuucaaccccaaguacgacugcaagaucaugacguccaagaccgacgucagcuccagcgugaucaccucccugggcgccaucgugagcugcuacgggaagaccaagugcacggcgagcaacaagugccgcggcaucaucaagaccuucuccaacgggugcgacuacgucagcaacaagggcguggacaccguguccgucggcaacacccuguacuacgugaacaagcaggagggccagagccucuacgugaagggggagcccaucaucaacuucuacgacccgcuggucuuccccuccgacgaguucgacgccagcaucucccaggugaacgagaagaucaaccagagccuggccuucauccggaaguccgacgagcuccugcacaacgugaacgucggcaagagcaccacgaacaucaugaucaccaccaucaucaucgugaucaucgugauccugcugcuccugaucgccgucgggcuguuccucuacugcaaggcccgcugaggacuaguaauaaggaaacuguaugaaugucugugggcaggaagugaagagauccuucuguaaagguuuuuggaauuaugucugcugaauaauaaacuuuuuugaaauaauaaaucugguagaaaaaugagaucuaaaaaaaaaaaaaaaaaaaaaaaaaaaaaaaaaaaaaaaaaaaaaaaaaaaaaaaaaaaaaaaaugcaucccccccccccccccccccccccccccccccaaaggcucuuuucagagccaccagaauu

SEQ ID NO: 19797 - RNA, 1985 nt, Artificial Sequence
  mRNA product Design h-4 comprising derived and/or modified sequence from HRSV(Memphis-37)__AIY60640.1__F-del_DSCav1_mut8 (opt1)
gggagagggcgcuuggcuugcaaggacccugagcugcggcauugaagcacacccaacccaacucgacugaagucagccucacugaaccggaucugagaaucuucucucucugggcuugccagggcucuccgaaccuagcuagcauccucuucaauuccaacuagaaagcuuaccauggagcugcccauccucaagaccaacgccaucaccacgauccuggccgcggugacccugugcuucgccagcucccagaacaucaccgaggaguucuaccagagcacgugcuccgccgucagcaagggcuaccucggggcccugcgcaccggcugguacaccuccgugaucaccaucgagcugagcaacaucaaggagaucaagugcaacgggaccgacgccaaggugaagcucaucaagcaggagcuggacaaguacaagaacgcggucacggaccugcagcuccugaugcaguccaccccggccgccggcagcggguccgccaucgcgagcggcaucgccgugugcaaggugcugcaccucgagggcgaggucaacaagaucaagaacgcccugcuguccaccaacaaggccguggugagccucuccgggugcggcgucagcgugcugaccuucaaggugcuggaccucaagaacuacaucgacaagcagcugcugcccauccucaacaagcaguccugcagcauccccaacaucgagacggucaucgaguuccagcagaagaacaaccggcugcuggagaucacccgcgaguucuccgugaacgccggggugaccacccccgucagcacguacaugcucaccaacuccgagcugcugagccucaucaacgacaugccgaucaccaacgaccagaagaagcugaugagcaacaacgugcagaucgugcggcagcaguccuacagcaucaugugcaucaucaaggaggagguccuggcguacguggugcagcucccccuguacggcgucaucgacacccccugcuggaagcugcacacgagcccccucugcaccaccaacaccaaggagggguccaacaucugccugacgcgcaccgaccggggcugguacugcgacaacgccggcuccgugagcuucuucccgcaggccgagaccugcaaggugcaguccaaccgcgucuucugcgacaccaugaacagccugacgcuccccuccgaggugaaccugugcaacaucgacaucuucaaccccaaguacgacugcaagaucaugaccagcaagaccgacgucuccagcuccgugaucaccagccugggggccaucguguccugcuacggcaagacgaagugcaccgccagcaacaagugccgggggaucaucaagaccuucuccaacggcugcgacuacgucagcaacaagggcguggacaccguguccgucgggaacacgcucuacuacgugaacaagcaggagggccagagccuguacgugaagggggagcccaucaucaacuucuacgacccgcuggucuuccccagcgacgaguucgacgcguccaucagccaggugaacgagaagaucaaccagucccucgccuucauccgcaagagcgacgagcugcugcacaacgugaacgucggcaaguccaccaccaacaucaugaucaccaccaucaucaucgugaucaucgugauccuccugcugcucaucgccgucgggcuguuccuguacugcaaggcccggugaggacuaguaauaaggaaacuguaugaaugucugugggcaggaagugaagagauccuucuguaaagguuuuuggaauuaugucugcugaauaauaaacuuuuuugaaauaauaaaucugguagaaaaaugagaucuaaaaaaaaaaaaaaaaaaaaaaaaaaaaaaaaaaaaaaaaaaaaaaaaaaaaaaaaaaaaaaaaugcaucccccccccccccccccccccccccccccccaaaggcucuuuucagagccaccagaauu

SEQ ID NO: 19798 - RNA, 1985 nt, Artificial Sequence
  mRNA product Design h-4 comprising derived and/or modified sequence from HRSV(Memphis-37)__AIY60640.1__F-del_DSCav1_mut8 (opt2)
gggagagggcgcuuggcuugcaaggacccugagcugcggcauugaagcacacccaacccaacucgacugaagucagccucacugaaccggaucugagaaucuucucucucugggcuugccagggcucuccgaaccuagcuagcauccucuucaauuccaacuagaaagcuuaccauggagcuccccauccucaagaccaacgccaucaccaccauccucgccgccgucacccucugcuucgccuccucccagaacaucaccgaggaguucuaccaguccaccugcuccgccgucuccaagggcuaccucggcgcccuccgcaccggcugguacaccuccgucaucaccaucgagcucuccaacaucaaggagaucaagugcaacggcaccgacgccaaggucaagcucaucaagcaggagcucgacaaguacaagaacgccgucaccgaccuccagcuccucaugcaguccacccccgccgccggcuccggcuccgccaucgccuccggcaucgccgucugcaagguccuccaccucgagggcgaggucaacaagaucaagaacgcccuccucuccaccaacaaggccgucgucucccucuccggcugcggcgucuccguccucaccuucaagguccucgaccucaagaacuacaucgacaagcagcuccuccccauccucaacaagcaguccugcuccauccccaacaucgagaccgucaucgaguuccagcagaagaacaaccgccuccucgagaucacccgcgaguucuccgucaacgccggcgucaccacccccgucuccaccuacaugcucaccaacuccgagcuccucucccucaucaacgacaugcccaucaccaacgaccagaagaagcucauguccaacaacguccagaucguccgccagcaguccuacuccaucaugugcaucaucaaggaggagguccucgccuacgucguccagcucccccucuacggcgucaucgacacccccugcuggaagcuccacaccuccccccucugcaccaccaacaccaaggagggcuccaacaucugccucacccgcaccgaccgcggcugguacugcgacaacgccggcuccgucuccuucuucccccaggccgagaccugcaagguccaguccaaccgcgucuucugcgacaccaugaacucccucacccuccccuccgaggucaaccucugcaacaucgacaucuucaaccccaaguacgacugcaagaucaugaccuccaagaccgacgucuccuccuccgucaucaccucccucggcgccaucgucuccugcuacggcaagaccaagugcaccgccuccaacaagugccgcggcaucaucaagaccuucuccaacggcugcgacuacgucuccaacaagggcgucgacaccgucuccgucggcaacacccucuacuacgucaacaagcaggagggccagucccucuacgucaagggcgagcccaucaucaacuucuacgacccccucgucuuccccuccgacgaguucgacgccuccaucucccaggucaacgagaagaucaaccagucccucgccuucauccgcaaguccgacgagcuccuccacaacgucaacgucggcaaguccaccaccaacaucaugaucaccaccaucaucaucgucaucaucgucauccuccuccuccucaucgccgucggccucuuccucuacugcaaggcccgcugaggacuaguaauaaggaaacuguaugaaugucugugggcaggaagugaagagauccuucuguaaagguuuuuggaauuaugucugcugaauaauaaacuuuuuugaaauaauaaaucugguagaaaaaugagaucuaaaaaaaaaaaaaaaaaaaaaaaaaaaaaaaaaaaaaaaaaaaaaaaaaaaaaaaaaaaaaaaaugcaucccccccccccccccccccccccccccccccaaaggcucuuuucagagccaccagaauu

SEQ ID NO: 19799 - RNA, 1985 nt, Artificial Sequence
  mRNA product Design h-4 comprising derived and/or modified sequence from HRSV(Memphis-37)__AIY60640.1__F-del_DSCav1_mut8 (opt3)
gggagagggcgcuuggcuugcaaggacccugagcugcggcauugaagcacacccaacccaacucgacugaagucagccucacugaaccggaucugagaaucuucucucucugggcuugccagggcucuccgaaccuagcuagcauccucuucaauuccaacuagaaagcuuaccauggagcugcccauccucaagaccaacgccauuacaacuauacuugcugcagugacgcugugcuucgccagcucccagaauaucaccgaagaguuuuaccaaucuacauguucagcggucaguaaaggcuauuugggggcuuuaagaacuggaugguacaccagcguuauuacaaucgaacuguccaacauuaaggagaucaaaugcaaugguaccgacgccaaggugaaacuaauaaagcaggaacucgauaaguauaaaaacgcaguaacugaccugcagcuucugaugcagucuacuccugccgcuggcucggggucagcaaucgccagcggaauugcuguguguaaggucuugcaccucgagggcgaggugaauaaaaucaagaacgcccugcugaguaccaauaaagcgguugugucccucucugguugcggggucagcguguuaacguucaagguacuggaucuuaagaacuacauugacaaacaauugcugccaauccuaaauaagcaguccuguucaauaccgaacauugaaacuguuaucgaguuucagcagaaaaauaacaggcuccuggaaauuacccgggaguucagugugaaugcaggagucacaacucccgugagcaccuauaugcuuacaaacucugagcuguugucccucaucaaugauaugccuaucaccaacgaccaaaagaaacugaugucaaacaaugugcagauuguccgccagcagagcuacaguauaaugugcaucauuaaggaagagguuuuagccuaugugguacaacugccacucuacggcgugaucgauacgcccuguuggaaacuucauacuucuccucugugcacaaccaacacuaaggaaggcuccaauauauguuugacacgaaccgaccgugggugguacugcgauaacgcuggaagcgucucguuuuucccacaggccgagacguguaaggugcagucuaauagaguuuucugcgacaccaugaacucccuaacacugcccucagaagugaaucucugcaacauugauaucuucaauccuaaauaugacuguaagaucaugacaaguaaaaccgaugucagcuccucugugauuacaagccugggugcaaucguaucaugcuacggcaagacuaaauguaccgcuaguaacaagugcagggggauuauaaagacauuuuccaauggaugugacuauguuagcaacaaaggcguggacaccgucucuguggguaauacucuuuacuaugucaacaagcaagaggggcagucacuguacgugaaaggagagccaaucauuaauuucuaugauccguugguuuuucccagugacgaauuugaugccagcaucucccaggugaacgagaagaucaaccagucucucgcguuuauucggaaaucggacgaacuguuacacaauguaaacgucggcaagagcacgacaaauauaaugaucaccacuauuaucauugugaucauaguuauccugcuacuccugauugccgugggccuuuucuuguacugcaaggcacgcugaggacuaguaauaaggaaacuguaugaaugucugugggcaggaagugaagagauccuucuguaaagguuuuuggaauuaugucugcugaauaauaaacuuuuuugaaauaauaaaucugguagaaaaaugagaucuaaaaaaaaaaaaaaaaaaaaaaaaaaaaaaaaaaaaaaaaaaaaaaaaaaaaaaaaaaaaaaaaugcaucccccccccccccccccccccccccccccccaaaggcucuuuucagagccaccagaauu

SEQ ID NO: 19800 - RNA, 1985 nt, Artificial Sequence
  mRNA product Design h-4 comprising derived and/or modified sequence from HRSV(Memphis-37)__AIY60640.1__F-del_DSCav1_mut8 (opt4)
gggagagggcgcuuggcuugcaaggacccugagcugcggcauugaagcacacccaacccaacucgacugaagucagccucacugaaccggaucugagaaucuucucucucugggcuugccagggcucuccgaaccuagcuagcauccucuucaauuccaacuagaaagcuuaccauggagcugcccauccugaagaccaacgccaucaccaccauccuggccgccgugacccugugcuucgccagcagccagaacaucaccgaggaguucuaccagagcaccugcagcgccgugagcaagggcuaccugggcgcccugagaaccggcugguacaccagcgugaucaccaucgagcugagcaacaucaaggagaucaagugcaacggcaccgacgccaaggugaagcugaucaagcaggagcuggacaaguacaagaacgccgugaccgaccugcagcugcugaugcagagcacccccgccgccggcagcggcagcgccaucgccagcggcaucgccgugugcaaggugcugcaccuggagggcgaggugaacaagaucaagaacgcccugcugagcaccaacaaggccguggugagccugagcggcugcggcgugagcgugcugaccuucaaggugcuggaccugaagaacuacaucgacaagcagcugcugcccauccugaacaagcagagcugcagcauccccaacaucgagaccgugaucgaguuccagcagaagaacaacagacugcuggagaucaccagagaguucagcgugaacgccggcgugaccacccccgugagcaccuacaugcugaccaacagcgagcugcugagccugaucaacgacaugcccaucaccaacgaccagaagaagcugaugagcaacaacgugcagaucgugagacagcagagcuacagcaucaugugcaucaucaaggaggaggugcuggccuacguggugcagcugccccuguacggcgugaucgacacccccugcuggaagcugcacaccagcccccugugcaccaccaacaccaaggagggcagcaacaucugccugaccagaaccgacagaggcugguacugcgacaacgccggcagcgugagcuucuucccccaggccgagaccugcaaggugcagagcaacagaguguucugcgacaccaugaacagccugacccugcccagcgaggugaaccugugcaacaucgacaucuucaaccccaaguacgacugcaagaucaugaccagcaagaccgacgugagcagcagcgugaucaccagccugggcgccaucgugagcugcuacggcaagaccaagugcaccgccagcaacaagugcagaggcaucaucaagaccuucagcaacggcugcgacuacgugagcaacaagggcguggacaccgugagcgugggcaacacccuguacuacgugaacaagcaggagggccagagccuguacgugaagggcgagcccaucaucaacuucuacgacccccugguguuccccagcgacgaguucgacgccagcaucagccaggugaacgagaagaucaaccagagccuggccuucaucagaaagagcgacgagcugcugcacaacgugaacgugggcaagagcaccaccaacaucaugaucaccaccaucaucaucgugaucaucgugauccugcugcugcugaucgccgugggccuguuccuguacugcaaggccagaugaggacuaguaauaaggaaacuguaugaaugucugugggcaggaagugaagagauccuucuguaaagguuuuuggaauuaugucugcugaauaauaaacuuuuuugaaauaauaaaucugguagaaaaaugagaucuaaaaaaaaaaaaaaaaaaaaaaaaaaaaaaaaaaaaaaaaaaaaaaaaaaaaaaaaaaaaaaaaugcaucccccccccccccccccccccccccccccccaaaggcucuuuucagagccaccagaauu

SEQ ID NO: 19801 - RNA, 1985 nt, Artificial Sequence
  mRNA product Design h-4 comprising derived and/or modified sequence from HRSV(Memphis-37)__AIY60640.1__F-del_DSCav1_mut8 (opt5)
gggagagggcgcuuggcuugcaaggacccugagcugcggcauugaagcacacccaacccaacucgacugaagucagccucacugaaccggaucugagaaucuucucucucugggcuugccagggcucuccgaaccuagcuagcauccucuucaauuccaacuagaaagcuuaccauggagcugcccauccucaagaccaacgccauuacaacgauccuggcugccgugacccuuugcuucgcgagcucccagaauauuacagaagaguuuuaccaaucuaccuguagcgcugucuccaaaggcuaucugggggcccucagaacaggaugguacaccucuguuaucacaauugaacugagcaacaucaaggagaucaaaugcaauggcaccgacgccaaggugaaacuuauuaagcaggaacuggauaaguauaaaaacgcugugacggaccuccagcugcugaugcaguccaccccugccgcugggucuggaagcgccaucgcguccggcauugccgucuguaaggugcuccaccuggagggggagguuaauaaaaucaagaacgcccuucugagcacaaauaaagcuguggucucucucuccggaugcggcgugagcguucugaccuucaaggugcuugaucugaagaacuacauugacaaacaacuccugccgauccugaauaagcagucuuguuccauucccaacaucgaaacagucaucgaguuucagcagaaaaauaaccggcuccuggaaauuacccgcgaguucagcgugaaugcuggcgugacgacaccugucucuaccuauaugcuuacaaacuccgagcugcucagccugaucaaugauaugcccauuaccaacgaccaaaagaaacuuauguccaacaauguucagaucgugagacagcagucuuacagcauuaugugcaucaucaaggaagaggugcuggccuaugucgugcaacucccucuguacgggguuauugauacccccuguuggaaacugcauacauccccucucugcacgaccaacacaaaggaaggaagcaauaucugucugacccggacagaccgcggcugguacugcgauaacgcggggucuguguccuuuuucccgcaggccgagaccuguaagguccagagcaauagaguguuuugcgacacgaugaacucucuuacacugcccagcgaaguuaaucucugcaacauugauaucuucaauccuaaauaugacuguaagauuaugaccuccaaaaccgaugugucuagcuccgucaucacaagccugggagcuaucgugucuugcuacggcaagaccaaauguacagccuccaacaagugccgggggauuaucaagacguuuagcaauggaugugacuaugucucuaacaaaggcguggacaccguuuccgugggcaauacacuuuacuaugucaacaagcaagaggggcagagccuguacgugaaaggagagcccauuaucaauuucuaugauccucucguuuuucccuccgacgaguucgaugcuucuauuagccaggugaacgaaaagaucaaccagucccuggccuuuauucgcaaaucugacgaacugcuccacaaugucaacgugggcaagagcaccacaaauaucaugaucaccacgauuaucauugugaucauuguuauccugcuucugcucaucgccgucgggcuguuccuguacugcaaggcuagaugaggacuaguaauaaggaaacuguaugaaugucugugggcaggaagugaagagauccuucuguaaagguuuuuggaauuaugucugcugaauaauaaacuuuuuugaaauaauaaaucugguagaaaaaugagaucuaaaaaaaaaaaaaaaaaaaaaaaaaaaaaaaaaaaaaaaaaaaaaaaaaaaaaaaaaaaaaaaaugcaucccccccccccccccccccccccccccccccaaaggcucuuuucagagccaccagaauu

SEQ ID NO: 19802 - RNA, 1985 nt, Artificial Sequence
  mRNA product Design h-4 comprising derived and/or modified sequence from HRSV(Memphis-37)__AIY60640.1__F-del_DSCav1_mut8 (opt6)
gggagagggcgcuuggcuugcaaggacccugagcugcggcauugaagcacacccaacccaacucgacugaagucagccucacugaaccggaucugagaaucuucucucucugggcuugccagggcucuccgaaccuagcuagcauccucuucaauuccaacuagaaagcuuaccauggaacuacccauacuaaaaacaaacgcaauuacaacaauacuugccgcaguaaccuuaugcuuugccucaucccaaaacauaacagaagaauuuuaucaaucaacaugcuccgcaguaucaaaaggauaccuaggcgcucuaagaacaggaugguacacauccguaaucacaauagaacuauccaauauaaaagaaauaaaauguaauggaacagaugcaaaaguuaaauuaauaaaacaagaacuagacaaauacaaaaacgcaguuaccgaucuccaacuauuaaugcaaucaacaccagcugcaggaaguggaagcgccauagcaagcggaauagcagucugcaaaguauuacaucuugaaggcgaaguaaacaaaaucaaaaaugcccuccucucaacaaacaaagcuguaguaucccuaucaggaugcgguguaucuguucuuacauuuaaaguacucgaucuaaaaaacuacaucgauaaacaguuacuuccaauacucaacaaacaaucauguagcauaccaaacauagaaacaguaauagaauuucaacaaaaaaacaaucgacuacucgaaauaacuagagaauuuucuguaaacgcuggaguaaccacaccagugucuaccuauaugcuuacaaauagcgaacuccuaucacuaaucaaugacaugccaauaacaaaugaccagaaaaaacucaugucaaauaacguacaaauaguacgacaacaaagcuacuccauaaugugcauaaucaaagaagaaguauuagccuacguuguucaacuaccauuauauggaguuauagacacuccaugcuggaaauuacauacaagcccacucuguacaacaaacacaaaagaaggcucaaacauaugcuuaacaagaacagauagaggaugguacugcgauaacgcaggcucagucucauuuuuuccacaagccgaaaccugcaaaguacaaucaaauagaguuuuuugcgacacaaugaacucacucacucuaccaagugaaguaaaucucuguaauaucgacauauucaacccaaaauaugacugcaaaauaaugacaucuaaaaccgauguauccucaagcguaaucacaucauuaggagcuauaguuuccugcuacgguaaaacaaaaugcacagcauccaacaaaugucgcgguaucaucaaaacauucuccaacggaugugauuacguaucaaacaaaggugucgacaccguaagcguaggcaacacuuuauacuauguaaacaaacaagaaggacaaagucuauauguaaaaggagaaccaauaauaaacuucuaugacccccuaguauucccuuccgacgaauuugaugcaagcauuucacaaguuaacgaaaaaaucaaucaaucccuugcuuucauaagaaaaucagacgaauuacuacacaacguaaacguaggaaaaagcacaacaaauaucaugauuacaacaauaauaauuguaauaauaguaauacuccucuuacuuauagcagucggcuuauuccuuuacugcaaagcaagauaaggacuaguaauaaggaaacuguaugaaugucugugggcaggaagugaagagauccuucuguaaagguuuuuggaauuaugucugcugaauaauaaacuuuuuugaaauaauaaaucugguagaaaaaugagaucuaaaaaaaaaaaaaaaaaaaaaaaaaaaaaaaaaaaaaaaaaaaaaaaaaaaaaaaaaaaaaaaaugcaucccccccccccccccccccccccccccccccaaaggcucuuuucagagccaccagaauu

SEQ ID NO: 19803 - RNA, 1985 nt, Artificial Sequence
  mRNA product Design h-4 comprising derived and/or modified sequence from HRSV(Memphis-37)__AIY60640.1__F-del_DSCav1_mut8 (opt11)
gggagagggcgcuuggcuugcaaggacccugagcugcggcauugaagcacacccaacccaacucgacugaagucagccucacugaaccggaucugagaaucuucucucucugggcuugccagggcucuccgaaccuagcuagcauccucuucaauuccaacuagaaagcuuaccauggaacuccccauccuaaaaaccaacgcaaucaccaccauccucgccgccguaacacucugcuuugcaagcucccaaaacaucaccgaagaauuuuaccaaucuaccugcagcgccguaucuaaaggauaccuaggagcccucagaaccgguugguacaccucugucaucacaauagaacucuccaacaucaaagaaaucaaaugcaacggcaccgacgccaaagucaaacucaucaaacaagaacucgacaaauauaaaaacgccguaaccgaccuccaacuccucaugcaauccacccccgccgccggcaguggcuccgcuaucgccuccggaaucgccguuugcaaaguccugcaccuagaaggcgaagucaacaaaaucaaaaacgcccugcucucaaccaacaaagcugucguaagccucuccggcugcggagucuccguccuuaccuucaaaguacucgaccuuaaaaacuacaucgacaaacaacuucuccccauacucaauaaacaauccugcuccauacccaacaucgaaacagucaucgaguuccaacagaaaaauaaccgccuccucgaaauaacccgcgaguucuccgucaacgcaggcgucaccaccccagucuccaccuacaugcugacaaacuccgaacuccuaucccucaucaacgacaugcccaucaccaacgaccaaaagaaacucaugagcaauaacguccaaaucguacgacaacaauccuacagcaucauguguaucaucaaagaagaaguacucgccuacgucguccaacucccacuauacggcgucaucgacacaccaugcuggaaacuucacaccuccccacucugcaccacaaacacaaaagaaggcuccaacaucugccuuacccgaaccgaccgcgggugguacugcgacaacgccggaucagucucguucuuuccccaagccgaaaccugcaaaguacaaucaaaucgcgucuucugcgacaccaugaacuccuuaacacuaccauccgaaguaaaccucugcaacauagacaucuucaacccaaaauacgacugcaaaaucaugaccuccaaaaccgacguauccuccuccguaaucaccagccucggcgcaauagucucaugcuacggcaaaaccaaaugcaccgccuccaacaaaugccgcggcaucauaaaaacuuucucuaacggaugcgacuacgucagcaacaaaggcgucgacaccguauccguagguaauacacuuuacuacgucaauaaacaagaaggccaaucccucuacgucaaaggagaacccaucauaaacuucuacgacccccucgucuuccccuccgacgaguucgacgccuccaucagccaggucaacgaaaagaucaaccaaucacucgccuucauccgcaaaagcgacgaacuccuccacaacguaaacgucggcaaauccacaaccaacauaaugaucaccacuaucaucaucgugauaaucgucauuuuacuucuccucaucgccguaggccucuuccuauacugcaaagcccgcuaaggacuaguaauaaggaaacuguaugaaugucugugggcaggaagugaagagauccuucuguaaagguuuuuggaauuaugucugcugaauaauaaacuuuuuugaaauaauaaaucugguagaaaaaugagaucuaaaaaaaaaaaaaaaaaaaaaaaaaaaaaaaaaaaaaaaaaaaaaaaaaaaaaaaaaaaaaaaaugcaucccccccccccccccccccccccccccccccaaaggcucuuuucagagccaccagaauu

SEQ ID NO: 19804 - RNA, 2001 nt, Artificial Sequence
  mRNA product Design h-5 comprising derived and/or modified sequence from HRSV(Memphis-37)__AIY60640.1__F-del_DSCav1_mut8 (opt1)
gggagagggcgcuuggcuugcaaggacccugagcugcggcauugaagcacacccaacccaacucgacugaagucagccucacugaaccggaucugagaaucuucucucucugggcuugccagggcucuccgaaccuagcuagcauccucuucaauuccaacuagaaagcuuaccauggagcugcccauccucaagaccaacgccaucaccacgauccuggccgcggugacccugugcuucgccagcucccagaacaucaccgaggaguucuaccagagcacgugcuccgccgucagcaagggcuaccucggcgcccugcgcaccgggugguacaccagcgugaucaccaucgagcuguccaacaucaaggagaucaagugcaacggcaccgacgccaaggugaagcucaucaagcaggagcuggacaaguacaagaacgcggucacggaccugcagcuccugaugcagagcaccccggccgccggcuccgggagcgcgaucgccuccggcaucgccgucugcaaggugcugcaccucgagggcgaggugaacaagaucaagaacgcccugcuguccaccaacaaggccgucgugagccucuccggcugcggggugagcguccugaccuucaaggugcuggaccucaagaacuacaucgacaagcagcugcugcccauccugaacaagcagagcugcuccauccccaacaucgagaccgucaucgaguuccagcagaagaacaaccgccuccuggagaucacgcgggaguucagcgugaacgcgggcgugaccacccccgucuccaccuacaugcugacgaacagcgagcuccugucccugaucaacgacaugccgaucaccaacgaccagaagaagcucaugagcaacaacgugcagaucgugcgccagcaguccuacagcaucaugugcaucaucaaggaggagguccuggccuacguggugcagcugccccucuacggggucaucgacacccccugcuggaagcugcacaccagcccccugugcacgaccaacaccaaggagggcuccaacaucugccucacccggacggaccgcgggugguacugcgacaacgccggcagcguguccuucuucccgcaggccgagaccugcaagguccagagcaaccggguguucugcgacaccaugaacucccugacccugcccagcgaggugaaccucugcaacaucgacaucuucaaccccaaguacgacugcaagaucaugacguccaagaccgacgucagcuccagcgugaucaccucccugggcgccaucgugagcugcuacgggaagaccaagugcacggcgagcaacaagugccgcggcaucaucaagaccuucuccaacgggugcgacuacgucagcaacaagggcguggacaccguguccgucggcaacacccuguacuacgugaacaagcaggagggccagagccucuacgugaagggggagcccaucaucaacuucuacgacccgcuggucuuccccuccgacgaguucgacgccagcaucucccaggugaacgagaagaucaaccagagccuggccuucauccggaaguccgacgagcuccugcacaacgugaacgucggcaagagcaccacgaacaucaugaucaccaccaucaucaucgugaucaucgugauccugcugcuccugaucgccgucgggcuguuccucuacugcaaggcccgcugaggacuaguacuggcugcaucucccuuuccucuguccuccauccuucucccaggauggugaagggggaccugguacccagugauccccaccccaggauccuaaaucaugacuuaccugcuaauaaaaacucauuggaaaagugagaagaucuaaaaaaaaaaaaaaaaaaaaaaaaaaaaaaaaaaaaaaaaaaaaaaaaaaaaaaaaaaaaaaaaugcaucccccccccccccccccccccccccccccccaaaggcucuuuucagagccaccagaauu

SEQ ID NO: 19805 - RNA, 2001 nt, Artificial Sequence
  mRNA product Design h-5 comprising derived and/or modified sequence from HRSV(Memphis-37)__AIY60640.1__F-del_DSCav1_mut8 (opt1)
gggagagggcgcuuggcuugcaaggacccugagcugcggcauugaagcacacccaacccaacucgacugaagucagccucacugaaccggaucugagaaucuucucucucugggcuugccagggcucuccgaaccuagcuagcauccucuucaauuccaacuagaaagcuuaccauggagcugcccauccucaagaccaacgccaucaccacgauccuggccgcggugacccugugcuucgccagcucccagaacaucaccgaggaguucuaccagagcacgugcuccgccgucagcaagggcuaccucggggcccugcgcaccggcugguacaccuccgugaucaccaucgagcugagcaacaucaaggagaucaagugcaacgggaccgacgccaaggugaagcucaucaagcaggagcuggacaaguacaagaacgcggucacggaccugcagcuccugaugcaguccaccccggccgccggcagcggguccgccaucgcgagcggcaucgccgugugcaaggugcugcaccucgagggcgaggucaacaagaucaagaacgcccugcuguccaccaacaaggccguggugagccucuccgggugcggcgucagcgugcugaccuucaaggugcuggaccucaagaacuacaucgacaagcagcugcugcccauccucaacaagcaguccugcagcauccccaacaucgagacggucaucgaguuccagcagaagaacaaccggcugcuggagaucacccgcgaguucuccgugaacgccggggugaccacccccgucagcacguacaugcucaccaacuccgagcugcugagccucaucaacgacaugccgaucaccaacgaccagaagaagcugaugagcaacaacgugcagaucgugcggcagcaguccuacagcaucaugugcaucaucaaggaggagguccuggcguacguggugcagcucccccuguacggcgucaucgacacccccugcuggaagcugcacacgagcccccucugcaccaccaacaccaaggagggguccaacaucugccugacgcgcaccgaccggggcugguacugcgacaacgccggcuccgugagcuucuucccgcaggccgagaccugcaaggugcaguccaaccgcgucuucugcgacaccaugaacagccugacgcuccccuccgaggugaaccugugcaacaucgacaucuucaaccccaaguacgacugcaagaucaugaccagcaagaccgacgucuccagcuccgugaucaccagccugggggccaucguguccugcuacggcaagacgaagugcaccgccagcaacaagugccgggggaucaucaagaccuucuccaacggcugcgacuacgucagcaacaagggcguggacaccguguccgucgggaacacgcucuacuacgugaacaagcaggagggccagagccuguacgugaagggggagcccaucaucaacuucuacgacccgcuggucuuccccagcgacgaguucgacgcguccaucagccaggugaacgagaagaucaaccagucccucgccuucauccgcaagagcgacgagcugcugcacaacgugaacgucggcaaguccaccaccaacaucaugaucaccaccaucaucaucgugaucaucgugauccuccugcugcucaucgccgucgggcuguuccuguacugcaaggcccggugaggacuaguacuggcugcaucucccuuuccucuguccuccauccuucucccaggauggugaagggggaccugguacccagugauccccaccccaggauccuaaaucaugacuuaccugcuaauaaaaacucauuggaaaagugagaagaucuaaaaaaaaaaaaaaaaaaaaaaaaaaaaaaaaaaaaaaaaaaaaaaaaaaaaaaaaaaaaaaaaugcaucccccccccccccccccccccccccccccccaaaggcucuuuucagagccaccagaauu

SEQ ID NO: 19806 - RNA, 2001 nt, Artificial Sequence
  mRNA product Design h-5 comprising derived and/or modified sequence from HRSV(Memphis-37)__AIY60640.1__F-del_DSCav1_mut8 (opt2)
gggagagggcgcuuggcuugcaaggacccugagcugcggcauugaagcacacccaacccaacucgacugaagucagccucacugaaccggaucugagaaucuucucucucugggcuugccagggcucuccgaaccuagcuagcauccucuucaauuccaacuagaaagcuuaccauggagcuccccauccucaagaccaacgccaucaccaccauccucgccgccgucacccucugcuucgccuccucccagaacaucaccgaggaguucuaccaguccaccugcuccgccgucuccaagggcuaccucggcgcccuccgcaccggcugguacaccuccgucaucaccaucgagcucuccaacaucaaggagaucaagugcaacggcaccgacgccaaggucaagcucaucaagcaggagcucgacaaguacaagaacgccgucaccgaccuccagcuccucaugcaguccacccccgccgccggcuccggcuccgccaucgccuccggcaucgccgucugcaagguccuccaccucgagggcgaggucaacaagaucaagaacgcccuccucuccaccaacaaggccgucgucucccucuccggcugcggcgucuccguccucaccuucaagguccucgaccucaagaacuacaucgacaagcagcuccuccccauccucaacaagcaguccugcuccauccccaacaucgagaccgucaucgaguuccagcagaagaacaaccgccuccucgagaucacccgcgaguucuccgucaacgccggcgucaccacccccgucuccaccuacaugcucaccaacuccgagcuccucucccucaucaacgacaugcccaucaccaacgaccagaagaagcucauguccaacaacguccagaucguccgccagcaguccuacuccaucaugugcaucaucaaggaggagguccucgccuacgucguccagcucccccucuacggcgucaucgacacccccugcuggaagcuccacaccuccccccucugcaccaccaacaccaaggagggcuccaacaucugccucacccgcaccgaccgcggcugguacugcgacaacgccggcuccgucuccuucuucccccaggccgagaccugcaagguccaguccaaccgcgucuucugcgacaccaugaacucccucacccuccccuccgaggucaaccucugcaacaucgacaucuucaaccccaaguacgacugcaagaucaugaccuccaagaccgacgucuccuccuccgucaucaccucccucggcgccaucgucuccugcuacggcaagaccaagugcaccgccuccaacaagugccgcggcaucaucaagaccuucuccaacggcugcgacuacgucuccaacaagggcgucgacaccgucuccgucggcaacacccucuacuacgucaacaagcaggagggccagucccucuacgucaagggcgagcccaucaucaacuucuacgacccccucgucuuccccuccgacgaguucgacgccuccaucucccaggucaacgagaagaucaaccagucccucgccuucauccgcaaguccgacgagcuccuccacaacgucaacgucggcaaguccaccaccaacaucaugaucaccaccaucaucaucgucaucaucgucauccuccuccuccucaucgccgucggccucuuccucuacugcaaggcccgcugaggacuaguacuggcugcaucucccuuuccucuguccuccauccuucucccaggauggugaagggggaccugguacccagugauccccaccccaggauccuaaaucaugacuuaccugcuaauaaaaacucauuggaaaagugagaagaucuaaaaaaaaaaaaaaaaaaaaaaaaaaaaaaaaaaaaaaaaaaaaaaaaaaaaaaaaaaaaaaaaugcaucccccccccccccccccccccccccccccccaaaggcucuuuucagagccaccagaauu

SEQ ID NO: 19807 - RNA, 2001 nt, Artificial Sequence
  mRNA product Design h-5 comprising derived and/or modified sequence from HRSV(Memphis-37)__AIY60640.1__F-del_DSCav1_mut8 (opt3)
gggagagggcgcuuggcuugcaaggacccugagcugcggcauugaagcacacccaacccaacucgacugaagucagccucacugaaccggaucugagaaucuucucucucugggcuugccagggcucuccgaaccuagcuagcauccucuucaauuccaacuagaaagcuuaccauggagcugcccauccucaagaccaacgccauuacaacuauacuugcugcagugacgcugugcuucgccagcucccagaauaucaccgaagaguuuuaccaaucuacauguucagcggucaguaaaggcuauuugggggcuuuaagaacuggaugguacaccagcguuauuacaaucgaacuguccaacauuaaggagaucaaaugcaaugguaccgacgccaaggugaaacuaauaaagcaggaacucgauaaguauaaaaacgcaguaacugaccugcagcuucugaugcagucuacuccugccgcuggcucggggucagcaaucgccagcggaauugcuguguguaaggucuugcaccucgagggcgaggugaauaaaaucaagaacgcccugcugaguaccaauaaagcgguugugucccucucugguugcggggucagcguguuaacguucaagguacuggaucuuaagaacuacauugacaaacaauugcugccaauccuaaauaagcaguccuguucaauaccgaacauugaaacuguuaucgaguuucagcagaaaaauaacaggcuccuggaaauuacccgggaguucagugugaaugcaggagucacaacucccgugagcaccuauaugcuuacaaacucugagcuguugucccucaucaaugauaugccuaucaccaacgaccaaaagaaacugaugucaaacaaugugcagauuguccgccagcagagcuacaguauaaugugcaucauuaaggaagagguuuuagccuaugugguacaacugccacucuacggcgugaucgauacgcccuguuggaaacuucauacuucuccucugugcacaaccaacacuaaggaaggcuccaauauauguuugacacgaaccgaccgugggugguacugcgauaacgcuggaagcgucucguuuuucccacaggccgagacguguaaggugcagucuaauagaguuuucugcgacaccaugaacucccuaacacugcccucagaagugaaucucugcaacauugauaucuucaauccuaaauaugacuguaagaucaugacaaguaaaaccgaugucagcuccucugugauuacaagccugggugcaaucguaucaugcuacggcaagacuaaauguaccgcuaguaacaagugcagggggauuauaaagacauuuuccaauggaugugacuauguuagcaacaaaggcguggacaccgucucuguggguaauacucuuuacuaugucaacaagcaagaggggcagucacuguacgugaaaggagagccaaucauuaauuucuaugauccguugguuuuucccagugacgaauuugaugccagcaucucccaggugaacgagaagaucaaccagucucucgcguuuauucggaaaucggacgaacuguuacacaauguaaacgucggcaagagcacgacaaauauaaugaucaccacuauuaucauugugaucauaguuauccugcuacuccugauugccgugggccuuuucuuguacugcaaggcacgcugaggacuaguacuggcugcaucucccuuuccucuguccuccauccuucucccaggauggugaagggggaccugguacccagugauccccaccccaggauccuaaaucaugacuuaccugcuaauaaaaacucauuggaaaagugagaagaucuaaaaaaaaaaaaaaaaaaaaaaaaaaaaaaaaaaaaaaaaaaaaaaaaaaaaaaaaaaaaaaaaugcaucccccccccccccccccccccccccccccccaaaggcucuuuucagagccaccagaauu

SEQ ID NO: 19808 - RNA, 2001 nt, Artificial Sequence
  mRNA product Design h-5 comprising derived and/or modified sequence from HRSV(Memphis-37)__AIY60640.1__F-del_DSCav1_mut8 (opt4)
gggagagggcgcuuggcuugcaaggacccugagcugcggcauugaagcacacccaacccaacucgacugaagucagccucacugaaccggaucugagaaucuucucucucugggcuugccagggcucuccgaaccuagcuagcauccucuucaauuccaacuagaaagcuuaccauggagcugcccauccugaagaccaacgccaucaccaccauccuggccgccgugacccugugcuucgccagcagccagaacaucaccgaggaguucuaccagagcaccugcagcgccgugagcaagggcuaccugggcgcccugagaaccggcugguacaccagcgugaucaccaucgagcugagcaacaucaaggagaucaagugcaacggcaccgacgccaaggugaagcugaucaagcaggagcuggacaaguacaagaacgccgugaccgaccugcagcugcugaugcagagcacccccgccgccggcagcggcagcgccaucgccagcggcaucgccgugugcaaggugcugcaccuggagggcgaggugaacaagaucaagaacgcccugcugagcaccaacaaggccguggugagccugagcggcugcggcgugagcgugcugaccuucaaggugcuggaccugaagaacuacaucgacaagcagcugcugcccauccugaacaagcagagcugcagcauccccaacaucgagaccgugaucgaguuccagcagaagaacaacagacugcuggagaucaccagagaguucagcgugaacgccggcgugaccacccccgugagcaccuacaugcugaccaacagcgagcugcugagccugaucaacgacaugcccaucaccaacgaccagaagaagcugaugagcaacaacgugcagaucgugagacagcagagcuacagcaucaugugcaucaucaaggaggaggugcuggccuacguggugcagcugccccuguacggcgugaucgacacccccugcuggaagcugcacaccagcccccugugcaccaccaacaccaaggagggcagcaacaucugccugaccagaaccgacagaggcugguacugcgacaacgccggcagcgugagcuucuucccccaggccgagaccugcaaggugcagagcaacagaguguucugcgacaccaugaacagccugacccugcccagcgaggugaaccugugcaacaucgacaucuucaaccccaaguacgacugcaagaucaugaccagcaagaccgacgugagcagcagcgugaucaccagccugggcgccaucgugagcugcuacggcaagaccaagugcaccgccagcaacaagugcagaggcaucaucaagaccuucagcaacggcugcgacuacgugagcaacaagggcguggacaccgugagcgugggcaacacccuguacuacgugaacaagcaggagggccagagccuguacgugaagggcgagcccaucaucaacuucuacgacccccugguguuccccagcgacgaguucgacgccagcaucagccaggugaacgagaagaucaaccagagccuggccuucaucagaaagagcgacgagcugcugcacaacgugaacgugggcaagagcaccaccaacaucaugaucaccaccaucaucaucgugaucaucgugauccugcugcugcugaucgccgugggccuguuccuguacugcaaggccagaugaggacuaguacuggcugcaucucccuuuccucuguccuccauccuucucccaggauggugaagggggaccugguacccagugauccccaccccaggauccuaaaucaugacuuaccugcuaauaaaaacucauuggaaaagugagaagaucuaaaaaaaaaaaaaaaaaaaaaaaaaaaaaaaaaaaaaaaaaaaaaaaaaaaaaaaaaaaaaaaaugcaucccccccccccccccccccccccccccccccaaaggcucuuuucagagccaccagaauu

SEQ ID NO: 19809 - RNA, 2001 nt, Artificial Sequence
  mRNA product Design h-5 comprising derived and/or modified sequence from HRSV(Memphis-37)__AIY60640.1__F-del_DSCav1_mut8 (opt5)
gggagagggcgcuuggcuugcaaggacccugagcugcggcauugaagcacacccaacccaacucgacugaagucagccucacugaaccggaucugagaaucuucucucucugggcuugccagggcucuccgaaccuagcuagcauccucuucaauuccaacuagaaagcuuaccauggagcugcccauccucaagaccaacgccauuacaacgauccuggcugccgugacccuuugcuucgcgagcucccagaauauuacagaagaguuuuaccaaucuaccuguagcgcugucuccaaaggcuaucugggggcccucagaacaggaugguacaccucuguuaucacaauugaacugagcaacaucaaggagaucaaaugcaauggcaccgacgccaaggugaaacuuauuaagcaggaacuggauaaguauaaaaacgcugugacggaccuccagcugcugaugcaguccaccccugccgcugggucuggaagcgccaucgcguccggcauugccgucuguaaggugcuccaccuggagggggagguuaauaaaaucaagaacgcccuucugagcacaaauaaagcuguggucucucucuccggaugcggcgugagcguucugaccuucaaggugcuugaucugaagaacuacauugacaaacaacuccugccgauccugaauaagcagucuuguuccauucccaacaucgaaacagucaucgaguuucagcagaaaaauaaccggcuccuggaaauuacccgcgaguucagcgugaaugcuggcgugacgacaccugucucuaccuauaugcuuacaaacuccgagcugcucagccugaucaaugauaugcccauuaccaacgaccaaaagaaacuuauguccaacaauguucagaucgugagacagcagucuuacagcauuaugugcaucaucaaggaagaggugcuggccuaugucgugcaacucccucuguacgggguuauugauacccccuguuggaaacugcauacauccccucucugcacgaccaacacaaaggaaggaagcaauaucugucugacccggacagaccgcggcugguacugcgauaacgcggggucuguguccuuuuucccgcaggccgagaccuguaagguccagagcaauagaguguuuugcgacacgaugaacucucuuacacugcccagcgaaguuaaucucugcaacauugauaucuucaauccuaaauaugacuguaagauuaugaccuccaaaaccgaugugucuagcuccgucaucacaagccugggagcuaucgugucuugcuacggcaagaccaaauguacagccuccaacaagugccgggggauuaucaagacguuuagcaauggaugugacuaugucucuaacaaaggcguggacaccguuuccgugggcaauacacuuuacuaugucaacaagcaagaggggcagagccuguacgugaaaggagagcccauuaucaauuucuaugauccucucguuuuucccuccgacgaguucgaugcuucuauuagccaggugaacgaaaagaucaaccagucccuggccuuuauucgcaaaucugacgaacugcuccacaaugucaacgugggcaagagcaccacaaauaucaugaucaccacgauuaucauugugaucauuguuauccugcuucugcucaucgccgucgggcuguuccuguacugcaaggcuagaugaggacuaguacuggcugcaucucccuuuccucuguccuccauccuucucccaggauggugaagggggaccugguacccagugauccccaccccaggauccuaaaucaugacuuaccugcuaauaaaaacucauuggaaaagugagaagaucuaaaaaaaaaaaaaaaaaaaaaaaaaaaaaaaaaaaaaaaaaaaaaaaaaaaaaaaaaaaaaaaaugcaucccccccccccccccccccccccccccccccaaaggcucuuuucagagccaccagaauu

SEQ ID NO: 19810 - RNA, 2001 nt, Artificial Sequence
  mRNA product Design h-5 comprising derived and/or modified sequence from HRSV(Memphis-37)__AIY60640.1__F-del_DSCav1_mut8 (opt6)
gggagagggcgcuuggcuugcaaggacccugagcugcggcauugaagcacacccaacccaacucgacugaagucagccucacugaaccggaucugagaaucuucucucucugggcuugccagggcucuccgaaccuagcuagcauccucuucaauuccaacuagaaagcuuaccauggaacuacccauacuaaaaacaaacgcaauuacaacaauacuugccgcaguaaccuuaugcuuugccucaucccaaaacauaacagaagaauuuuaucaaucaacaugcuccgcaguaucaaaaggauaccuaggcgcucuaagaacaggaugguacacauccguaaucacaauagaacuauccaauauaaaagaaauaaaauguaauggaacagaugcaaaaguuaaauuaauaaaacaagaacuagacaaauacaaaaacgcaguuaccgaucuccaacuauuaaugcaaucaacaccagcugcaggaaguggaagcgccauagcaagcggaauagcagucugcaaaguauuacaucuugaaggcgaaguaaacaaaaucaaaaaugcccuccucucaacaaacaaagcuguaguaucccuaucaggaugcgguguaucuguucuuacauuuaaaguacucgaucuaaaaaacuacaucgauaaacaguuacuuccaauacucaacaaacaaucauguagcauaccaaacauagaaacaguaauagaauuucaacaaaaaaacaaucgacuacucgaaauaacuagagaauuuucuguaaacgcuggaguaaccacaccagugucuaccuauaugcuuacaaauagcgaacuccuaucacuaaucaaugacaugccaauaacaaaugaccagaaaaaacucaugucaaauaacguacaaauaguacgacaacaaagcuacuccauaaugugcauaaucaaagaagaaguauuagccuacguuguucaacuaccauuauauggaguuauagacacuccaugcuggaaauuacauacaagcccacucuguacaacaaacacaaaagaaggcucaaacauaugcuuaacaagaacagauagaggaugguacugcgauaacgcaggcucagucucauuuuuuccacaagccgaaaccugcaaaguacaaucaaauagaguuuuuugcgacacaaugaacucacucacucuaccaagugaaguaaaucucuguaauaucgacauauucaacccaaaauaugacugcaaaauaaugacaucuaaaaccgauguauccucaagcguaaucacaucauuaggagcuauaguuuccugcuacgguaaaacaaaaugcacagcauccaacaaaugucgcgguaucaucaaaacauucuccaacggaugugauuacguaucaaacaaaggugucgacaccguaagcguaggcaacacuuuauacuauguaaacaaacaagaaggacaaagucuauauguaaaaggagaaccaauaauaaacuucuaugacccccuaguauucccuuccgacgaauuugaugcaagcauuucacaaguuaacgaaaaaaucaaucaaucccuugcuuucauaagaaaaucagacgaauuacuacacaacguaaacguaggaaaaagcacaacaaauaucaugauuacaacaauaauaauuguaauaauaguaauacuccucuuacuuauagcagucggcuuauuccuuuacugcaaagcaagauaaggacuaguacuggcugcaucucccuuuccucuguccuccauccuucucccaggauggugaagggggaccugguacccagugauccccaccccaggauccuaaaucaugacuuaccugcuaauaaaaacucauuggaaaagugagaagaucuaaaaaaaaaaaaaaaaaaaaaaaaaaaaaaaaaaaaaaaaaaaaaaaaaaaaaaaaaaaaaaaaugcaucccccccccccccccccccccccccccccccaaaggcucuuuucagagccaccagaauu

SEQ ID NO: 19811 - RNA, 2001 nt, Artificial Sequence
  mRNA product Design h-5 comprising derived and/or modified sequence from HRSV(Memphis-37)__AIY60640.1__F-del_DSCav1_mut8 (opt11)
gggagagggcgcuuggcuugcaaggacccugagcugcggcauugaagcacacccaacccaacucgacugaagucagccucacugaaccggaucugagaaucuucucucucugggcuugccagggcucuccgaaccuagcuagcauccucuucaauuccaacuagaaagcuuaccauggaacuccccauccuaaaaaccaacgcaaucaccaccauccucgccgccguaacacucugcuuugcaagcucccaaaacaucaccgaagaauuuuaccaaucuaccugcagcgccguaucuaaaggauaccuaggagcccucagaaccgguugguacaccucugucaucacaauagaacucuccaacaucaaagaaaucaaaugcaacggcaccgacgccaaagucaaacucaucaaacaagaacucgacaaauauaaaaacgccguaaccgaccuccaacuccucaugcaauccacccccgccgccggcaguggcuccgcuaucgccuccggaaucgccguuugcaaaguccugcaccuagaaggcgaagucaacaaaaucaaaaacgcccugcucucaaccaacaaagcugucguaagccucuccggcugcggagucuccguccuuaccuucaaaguacucgaccuuaaaaacuacaucgacaaacaacuucuccccauacucaauaaacaauccugcuccauacccaacaucgaaacagucaucgaguuccaacagaaaaauaaccgccuccucgaaauaacccgcgaguucuccgucaacgcaggcgucaccaccccagucuccaccuacaugcugacaaacuccgaacuccuaucccucaucaacgacaugcccaucaccaacgaccaaaagaaacucaugagcaauaacguccaaaucguacgacaacaauccuacagcaucauguguaucaucaaagaagaaguacucgccuacgucguccaacucccacuauacggcgucaucgacacaccaugcuggaaacuucacaccuccccacucugcaccacaaacacaaaagaaggcuccaacaucugccuuacccgaaccgaccgcgggugguacugcgacaacgccggaucagucucguucuuuccccaagccgaaaccugcaaaguacaaucaaaucgcgucuucugcgacaccaugaacuccuuaacacuaccauccgaaguaaaccucugcaacauagacaucuucaacccaaaauacgacugcaaaaucaugaccuccaaaaccgacguauccuccuccguaaucaccagccucggcgcaauagucucaugcuacggcaaaaccaaaugcaccgccuccaacaaaugccgcggcaucauaaaaacuuucucuaacggaugcgacuacgucagcaacaaaggcgucgacaccguauccguagguaauacacuuuacuacgucaauaaacaagaaggccaaucccucuacgucaaaggagaacccaucauaaacuucuacgacccccucgucuuccccuccgacgaguucgacgccuccaucagccaggucaacgaaaagaucaaccaaucacucgccuucauccgcaaaagcgacgaacuccuccacaacguaaacgucggcaaauccacaaccaacauaaugaucaccacuaucaucaucgugauaaucgucauuuuacuucuccucaucgccguaggccucuuccuauacugcaaagcccgcuaaggacuaguacuggcugcaucucccuuuccucuguccuccauccuucucccaggauggugaagggggaccugguacccagugauccccaccccaggauccuaaaucaugacuuaccugcuaauaaaaacucauuggaaaagugagaagaucuaaaaaaaaaaaaaaaaaaaaaaaaaaaaaaaaaaaaaaaaaaaaaaaaaaaaaaaaaaaaaaaaugcaucccccccccccccccccccccccccccccccaaaggcucuuuucagagccaccagaauu

SEQ ID NO: 19812 - RNA, 1934 nt, Artificial Sequence
  mRNA product Design i-1 comprising derived and/or modified sequence from HRSV(Memphis-37)__AIY60640.1__F-del_DSCav1_mut8 (opt1)
gggagagggcgcuuggcuugcaaggacccugagcugcggcauugaagcacacccaacccaacucgacugaagucagccucacugaaccggaucugagaaucuucucucucugggcuugccagggcucuccgaaccuagcuagcauccucuucaauuccaacuagaaagcuuaccauggagcugcccauccucaagaccaacgccaucaccacgauccuggccgcggugacccugugcuucgccagcucccagaacaucaccgaggaguucuaccagagcacgugcuccgccgucagcaagggcuaccucggcgcccugcgcaccgggugguacaccagcgugaucaccaucgagcuguccaacaucaaggagaucaagugcaacggcaccgacgccaaggugaagcucaucaagcaggagcuggacaaguacaagaacgcggucacggaccugcagcuccugaugcagagcaccccggccgccggcuccgggagcgcgaucgccuccggcaucgccgucugcaaggugcugcaccucgagggcgaggugaacaagaucaagaacgcccugcuguccaccaacaaggccgucgugagccucuccggcugcggggugagcguccugaccuucaaggugcuggaccucaagaacuacaucgacaagcagcugcugcccauccugaacaagcagagcugcuccauccccaacaucgagaccgucaucgaguuccagcagaagaacaaccgccuccuggagaucacgcgggaguucagcgugaacgcgggcgugaccacccccgucuccaccuacaugcugacgaacagcgagcuccugucccugaucaacgacaugccgaucaccaacgaccagaagaagcucaugagcaacaacgugcagaucgugcgccagcaguccuacagcaucaugugcaucaucaaggaggagguccuggccuacguggugcagcugccccucuacggggucaucgacacccccugcuggaagcugcacaccagcccccugugcacgaccaacaccaaggagggcuccaacaucugccucacccggacggaccgcgggugguacugcgacaacgccggcagcguguccuucuucccgcaggccgagaccugcaagguccagagcaaccggguguucugcgacaccaugaacucccugacccugcccagcgaggugaaccucugcaacaucgacaucuucaaccccaaguacgacugcaagaucaugacguccaagaccgacgucagcuccagcgugaucaccucccugggcgccaucgugagcugcuacgggaagaccaagugcacggcgagcaacaagugccgcggcaucaucaagaccuucuccaacgggugcgacuacgucagcaacaagggcguggacaccguguccgucggcaacacccuguacuacgugaacaagcaggagggccagagccucuacgugaagggggagcccaucaucaacuucuacgacccgcuggucuuccccuccgacgaguucgacgccagcaucucccaggugaacgagaagaucaaccagagccuggccuucauccggaaguccgacgagcuccugcacaacgugaacgucggcaagagcaccacgaacaucaugaucaccaccaucaucaucgugaucaucgugauccugcugcuccugaucgccgucgggcuguuccucuacugcaaggcccgcugaggacuaguguccaccugucccuccugggcugcuggauugucucguuuuccugccaaauaaacaggaucagcgcuuuacagaucuaaaaaaaaaaaaaaaaaaaaaaaaaaaaaaaaaaaaaaaaaaaaaaaaaaaaaaaaaaaaaaaaugcaucccccccccccccccccccccccccccccccaaaggcucuuuucagagccaccagaauu

SEQ ID NO: 19813 - RNA, 1934 nt, Artificial Sequence
  mRNA product Design i-1 comprising derived and/or modified sequence from HRSV(Memphis-37)__AIY60640.1__F-del_DSCav1_mut8 (opt1)
gggagagggcgcuuggcuugcaaggacccugagcugcggcauugaagcacacccaacccaacucgacugaagucagccucacugaaccggaucugagaaucuucucucucugggcuugccagggcucuccgaaccuagcuagcauccucuucaauuccaacuagaaagcuuaccauggagcugcccauccucaagaccaacgccaucaccacgauccuggccgcggugacccugugcuucgccagcucccagaacaucaccgaggaguucuaccagagcacgugcuccgccgucagcaagggcuaccucggggcccugcgcaccggcugguacaccuccgugaucaccaucgagcugagcaacaucaaggagaucaagugcaacgggaccgacgccaaggugaagcucaucaagcaggagcuggacaaguacaagaacgcggucacggaccugcagcuccugaugcaguccaccccggccgccggcagcggguccgccaucgcgagcggcaucgccgugugcaaggugcugcaccucgagggcgaggucaacaagaucaagaacgcccugcuguccaccaacaaggccguggugagccucuccgggugcggcgucagcgugcugaccuucaaggugcuggaccucaagaacuacaucgacaagcagcugcugcccauccucaacaagcaguccugcagcauccccaacaucgagacggucaucgaguuccagcagaagaacaaccggcugcuggagaucacccgcgaguucuccgugaacgccggggugaccacccccgucagcacguacaugcucaccaacuccgagcugcugagccucaucaacgacaugccgaucaccaacgaccagaagaagcugaugagcaacaacgugcagaucgugcggcagcaguccuacagcaucaugugcaucaucaaggaggagguccuggcguacguggugcagcucccccuguacggcgucaucgacacccccugcuggaagcugcacacgagcccccucugcaccaccaacaccaaggagggguccaacaucugccugacgcgcaccgaccggggcugguacugcgacaacgccggcuccgugagcuucuucccgcaggccgagaccugcaaggugcaguccaaccgcgucuucugcgacaccaugaacagccugacgcuccccuccgaggugaaccugugcaacaucgacaucuucaaccccaaguacgacugcaagaucaugaccagcaagaccgacgucuccagcuccgugaucaccagccugggggccaucguguccugcuacggcaagacgaagugcaccgccagcaacaagugccgggggaucaucaagaccuucuccaacggcugcgacuacgucagcaacaagggcguggacaccguguccgucgggaacacgcucuacuacgugaacaagcaggagggccagagccuguacgugaagggggagcccaucaucaacuucuacgacccgcuggucuuccccagcgacgaguucgacgcguccaucagccaggugaacgagaagaucaaccagucccucgccuucauccgcaagagcgacgagcugcugcacaacgugaacgucggcaaguccaccaccaacaucaugaucaccaccaucaucaucgugaucaucgugauccuccugcugcucaucgccgucgggcuguuccuguacugcaaggcccggugaggacuaguguccaccugucccuccugggcugcuggauugucucguuuuccugccaaauaaacaggaucagcgcuuuacagaucuaaaaaaaaaaaaaaaaaaaaaaaaaaaaaaaaaaaaaaaaaaaaaaaaaaaaaaaaaaaaaaaaugcaucccccccccccccccccccccccccccccccaaaggcucuuuucagagccaccagaauu

SEQ ID NO: 19814 - RNA, 1934 nt, Artificial Sequence
  mRNA product Design i-1 comprising derived and/or modified sequence from HRSV(Memphis-37)__AIY60640.1__F-del_DSCav1_mut8 (opt2)
gggagagggcgcuuggcuugcaaggacccugagcugcggcauugaagcacacccaacccaacucgacugaagucagccucacugaaccggaucugagaaucuucucucucugggcuugccagggcucuccgaaccuagcuagcauccucuucaauuccaacuagaaagcuuaccauggagcuccccauccucaagaccaacgccaucaccaccauccucgccgccgucacccucugcuucgccuccucccagaacaucaccgaggaguucuaccaguccaccugcuccgccgucuccaagggcuaccucggcgcccuccgcaccggcugguacaccuccgucaucaccaucgagcucuccaacaucaaggagaucaagugcaacggcaccgacgccaaggucaagcucaucaagcaggagcucgacaaguacaagaacgccgucaccgaccuccagcuccucaugcaguccacccccgccgccggcuccggcuccgccaucgccuccggcaucgccgucugcaagguccuccaccucgagggcgaggucaacaagaucaagaacgcccuccucuccaccaacaaggccgucgucucccucuccggcugcggcgucuccguccucaccuucaagguccucgaccucaagaacuacaucgacaagcagcuccuccccauccucaacaagcaguccugcuccauccccaacaucgagaccgucaucgaguuccagcagaagaacaaccgccuccucgagaucacccgcgaguucuccgucaacgccggcgucaccacccccgucuccaccuacaugcucaccaacuccgagcuccucucccucaucaacgacaugcccaucaccaacgaccagaagaagcucauguccaacaacguccagaucguccgccagcaguccuacuccaucaugugcaucaucaaggaggagguccucgccuacgucguccagcucccccucuacggcgucaucgacacccccugcuggaagcuccacaccuccccccucugcaccaccaacaccaaggagggcuccaacaucugccucacccgcaccgaccgcggcugguacugcgacaacgccggcuccgucuccuucuucccccaggccgagaccugcaagguccaguccaaccgcgucuucugcgacaccaugaacucccucacccuccccuccgaggucaaccucugcaacaucgacaucuucaaccccaaguacgacugcaagaucaugaccuccaagaccgacgucuccuccuccgucaucaccucccucggcgccaucgucuccugcuacggcaagaccaagugcaccgccuccaacaagugccgcggcaucaucaagaccuucuccaacggcugcgacuacgucuccaacaagggcgucgacaccgucuccgucggcaacacccucuacuacgucaacaagcaggagggccagucccucuacgucaagggcgagcccaucaucaacuucuacgacccccucgucuuccccuccgacgaguucgacgccuccaucucccaggucaacgagaagaucaaccagucccucgccuucauccgcaaguccgacgagcuccuccacaacgucaacgucggcaaguccaccaccaacaucaugaucaccaccaucaucaucgucaucaucgucauccuccuccuccucaucgccgucggccucuuccucuacugcaaggcccgcugaggacuaguguccaccugucccuccugggcugcuggauugucucguuuuccugccaaauaaacaggaucagcgcuuuacagaucuaaaaaaaaaaaaaaaaaaaaaaaaaaaaaaaaaaaaaaaaaaaaaaaaaaaaaaaaaaaaaaaaugcaucccccccccccccccccccccccccccccccaaaggcucuuuucagagccaccagaauu

SEQ ID NO: 19815 - RNA, 1934 nt, Artificial Sequence
  mRNA product Design i-1 comprising derived and/or modified sequence from HRSV(Memphis-37)__AIY60640.1__F-del_DSCav1_mut8 (opt3)
gggagagggcgcuuggcuugcaaggacccugagcugcggcauugaagcacacccaacccaacucgacugaagucagccucacugaaccggaucugagaaucuucucucucugggcuugccagggcucuccgaaccuagcuagcauccucuucaauuccaacuagaaagcuuaccauggagcugcccauccucaagaccaacgccauuacaacuauacuugcugcagugacgcugugcuucgccagcucccagaauaucaccgaagaguuuuaccaaucuacauguucagcggucaguaaaggcuauuugggggcuuuaagaacuggaugguacaccagcguuauuacaaucgaacuguccaacauuaaggagaucaaaugcaaugguaccgacgccaaggugaaacuaauaaagcaggaacucgauaaguauaaaaacgcaguaacugaccugcagcuucugaugcagucuacuccugccgcuggcucggggucagcaaucgccagcggaauugcuguguguaaggucuugcaccucgagggcgaggugaauaaaaucaagaacgcccugcugaguaccaauaaagcgguugugucccucucugguugcggggucagcguguuaacguucaagguacuggaucuuaagaacuacauugacaaacaauugcugccaauccuaaauaagcaguccuguucaauaccgaacauugaaacuguuaucgaguuucagcagaaaaauaacaggcuccuggaaauuacccgggaguucagugugaaugcaggagucacaacucccgugagcaccuauaugcuuacaaacucugagcuguugucccucaucaaugauaugccuaucaccaacgaccaaaagaaacugaugucaaacaaugugcagauuguccgccagcagagcuacaguauaaugugcaucauuaaggaagagguuuuagccuaugugguacaacugccacucuacggcgugaucgauacgcccuguuggaaacuucauacuucuccucugugcacaaccaacacuaaggaaggcuccaauauauguuugacacgaaccgaccgugggugguacugcgauaacgcuggaagcgucucguuuuucccacaggccgagacguguaaggugcagucuaauagaguuuucugcgacaccaugaacucccuaacacugcccucagaagugaaucucugcaacauugauaucuucaauccuaaauaugacuguaagaucaugacaaguaaaaccgaugucagcuccucugugauuacaagccugggugcaaucguaucaugcuacggcaagacuaaauguaccgcuaguaacaagugcagggggauuauaaagacauuuuccaauggaugugacuauguuagcaacaaaggcguggacaccgucucuguggguaauacucuuuacuaugucaacaagcaagaggggcagucacuguacgugaaaggagagccaaucauuaauuucuaugauccguugguuuuucccagugacgaauuugaugccagcaucucccaggugaacgagaagaucaaccagucucucgcguuuauucggaaaucggacgaacuguuacacaauguaaacgucggcaagagcacgacaaauauaaugaucaccacuauuaucauugugaucauaguuauccugcuacuccugauugccgugggccuuuucuuguacugcaaggcacgcugaggacuaguguccaccugucccuccugggcugcuggauugucucguuuuccugccaaauaaacaggaucagcgcuuuacagaucuaaaaaaaaaaaaaaaaaaaaaaaaaaaaaaaaaaaaaaaaaaaaaaaaaaaaaaaaaaaaaaaaugcaucccccccccccccccccccccccccccccccaaaggcucuuuucagagccaccagaauu

SEQ ID NO: 19816 - RNA, 1934 nt, Artificial Sequence
  mRNA product Design i-1 comprising derived and/or modified sequence from HRSV(Memphis-37)__AIY60640.1__F-del_DSCav1_mut8 (opt4)
gggagagggcgcuuggcuugcaaggacccugagcugcggcauugaagcacacccaacccaacucgacugaagucagccucacugaaccggaucugagaaucuucucucucugggcuugccagggcucuccgaaccuagcuagcauccucuucaauuccaacuagaaagcuuaccauggagcugcccauccugaagaccaacgccaucaccaccauccuggccgccgugacccugugcuucgccagcagccagaacaucaccgaggaguucuaccagagcaccugcagcgccgugagcaagggcuaccugggcgcccugagaaccggcugguacaccagcgugaucaccaucgagcugagcaacaucaaggagaucaagugcaacggcaccgacgccaaggugaagcugaucaagcaggagcuggacaaguacaagaacgccgugaccgaccugcagcugcugaugcagagcacccccgccgccggcagcggcagcgccaucgccagcggcaucgccgugugcaaggugcugcaccuggagggcgaggugaacaagaucaagaacgcccugcugagcaccaacaaggccguggugagccugagcggcugcggcgugagcgugcugaccuucaaggugcuggaccugaagaacuacaucgacaagcagcugcugcccauccugaacaagcagagcugcagcauccccaacaucgagaccgugaucgaguuccagcagaagaacaacagacugcuggagaucaccagagaguucagcgugaacgccggcgugaccacccccgugagcaccuacaugcugaccaacagcgagcugcugagccugaucaacgacaugcccaucaccaacgaccagaagaagcugaugagcaacaacgugcagaucgugagacagcagagcuacagcaucaugugcaucaucaaggaggaggugcuggccuacguggugcagcugccccuguacggcgugaucgacacccccugcuggaagcugcacaccagcccccugugcaccaccaacaccaaggagggcagcaacaucugccugaccagaaccgacagaggcugguacugcgacaacgccggcagcgugagcuucuucccccaggccgagaccugcaaggugcagagcaacagaguguucugcgacaccaugaacagccugacccugcccagcgaggugaaccugugcaacaucgacaucuucaaccccaaguacgacugcaagaucaugaccagcaagaccgacgugagcagcagcgugaucaccagccugggcgccaucgugagcugcuacggcaagaccaagugcaccgccagcaacaagugcagaggcaucaucaagaccuucagcaacggcugcgacuacgugagcaacaagggcguggacaccgugagcgugggcaacacccuguacuacgugaacaagcaggagggccagagccuguacgugaagggcgagcccaucaucaacuucuacgacccccugguguuccccagcgacgaguucgacgccagcaucagccaggugaacgagaagaucaaccagagccuggccuucaucagaaagagcgacgagcugcugcacaacgugaacgugggcaagagcaccaccaacaucaugaucaccaccaucaucaucgugaucaucgugauccugcugcugcugaucgccgugggccuguuccuguacugcaaggccagaugaggacuaguguccaccugucccuccugggcugcuggauugucucguuuuccugccaaauaaacaggaucagcgcuuuacagaucuaaaaaaaaaaaaaaaaaaaaaaaaaaaaaaaaaaaaaaaaaaaaaaaaaaaaaaaaaaaaaaaaugcaucccccccccccccccccccccccccccccccaaaggcucuuuucagagccaccagaauu

SEQ ID NO: 19817 - RNA, 1934 nt, Artificial Sequence
  mRNA product Design i-1 comprising derived and/or modified sequence from HRSV(Memphis-37)__AIY60640.1__F-del_DSCav1_mut8 (opt5)
gggagagggcgcuuggcuugcaaggacccugagcugcggcauugaagcacacccaacccaacucgacugaagucagccucacugaaccggaucugagaaucuucucucucugggcuugccagggcucuccgaaccuagcuagcauccucuucaauuccaacuagaaagcuuaccauggagcugcccauccucaagaccaacgccauuacaacgauccuggcugccgugacccuuugcuucgcgagcucccagaauauuacagaagaguuuuaccaaucuaccuguagcgcugucuccaaaggcuaucugggggcccucagaacaggaugguacaccucuguuaucacaauugaacugagcaacaucaaggagaucaaaugcaauggcaccgacgccaaggugaaacuuauuaagcaggaacuggauaaguauaaaaacgcugugacggaccuccagcugcugaugcaguccaccccugccgcugggucuggaagcgccaucgcguccggcauugccgucuguaaggugcuccaccuggagggggagguuaauaaaaucaagaacgcccuucugagcacaaauaaagcuguggucucucucuccggaugcggcgugagcguucugaccuucaaggugcuugaucugaagaacuacauugacaaacaacuccugccgauccugaauaagcagucuuguuccauucccaacaucgaaacagucaucgaguuucagcagaaaaauaaccggcuccuggaaauuacccgcgaguucagcgugaaugcuggcgugacgacaccugucucuaccuauaugcuuacaaacuccgagcugcucagccugaucaaugauaugcccauuaccaacgaccaaaagaaacuuauguccaacaauguucagaucgugagacagcagucuuacagcauuaugugcaucaucaaggaagaggugcuggccuaugucgugcaacucccucuguacgggguuauugauacccccuguuggaaacugcauacauccccucucugcacgaccaacacaaaggaaggaagcaauaucugucugacccggacagaccgcggcugguacugcgauaacgcggggucuguguccuuuuucccgcaggccgagaccuguaagguccagagcaauagaguguuuugcgacacgaugaacucucuuacacugcccagcgaaguuaaucucugcaacauugauaucuucaauccuaaauaugacuguaagauuaugaccuccaaaaccgaugugucuagcuccgucaucacaagccugggagcuaucgugucuugcuacggcaagaccaaauguacagccuccaacaagugccgggggauuaucaagacguuuagcaauggaugugacuaugucucuaacaaaggcguggacaccguuuccgugggcaauacacuuuacuaugucaacaagcaagaggggcagagccuguacgugaaaggagagcccauuaucaauuucuaugauccucucguuuuucccuccgacgaguucgaugcuucuauuagccaggugaacgaaaagaucaaccagucccuggccuuuauucgcaaaucugacgaacugcuccacaaugucaacgugggcaagagcaccacaaauaucaugaucaccacgauuaucauugugaucauuguuauccugcuucugcucaucgccgucgggcuguuccuguacugcaaggcuagaugaggacuaguguccaccugucccuccugggcugcuggauugucucguuuuccugccaaauaaacaggaucagcgcuuuacagaucuaaaaaaaaaaaaaaaaaaaaaaaaaaaaaaaaaaaaaaaaaaaaaaaaaaaaaaaaaaaaaaaaugcaucccccccccccccccccccccccccccccccaaaggcucuuuucagagccaccagaauu

SEQ ID NO: 19818 - RNA, 1934 nt, Artificial Sequence
  mRNA product Design i-1 comprising derived and/or modified sequence from HRSV(Memphis-37)__AIY60640.1__F-del_DSCav1_mut8 (opt6)
gggagagggcgcuuggcuugcaaggacccugagcugcggcauugaagcacacccaacccaacucgacugaagucagccucacugaaccggaucugagaaucuucucucucugggcuugccagggcucuccgaaccuagcuagcauccucuucaauuccaacuagaaagcuuaccauggaacuacccauacuaaaaacaaacgcaauuacaacaauacuugccgcaguaaccuuaugcuuugccucaucccaaaacauaacagaagaauuuuaucaaucaacaugcuccgcaguaucaaaaggauaccuaggcgcucuaagaacaggaugguacacauccguaaucacaauagaacuauccaauauaaaagaaauaaaauguaauggaacagaugcaaaaguuaaauuaauaaaacaagaacuagacaaauacaaaaacgcaguuaccgaucuccaacuauuaaugcaaucaacaccagcugcaggaaguggaagcgccauagcaagcggaauagcagucugcaaaguauuacaucuugaaggcgaaguaaacaaaaucaaaaaugcccuccucucaacaaacaaagcuguaguaucccuaucaggaugcgguguaucuguucuuacauuuaaaguacucgaucuaaaaaacuacaucgauaaacaguuacuuccaauacucaacaaacaaucauguagcauaccaaacauagaaacaguaauagaauuucaacaaaaaaacaaucgacuacucgaaauaacuagagaauuuucuguaaacgcuggaguaaccacaccagugucuaccuauaugcuuacaaauagcgaacuccuaucacuaaucaaugacaugccaauaacaaaugaccagaaaaaacucaugucaaauaacguacaaauaguacgacaacaaagcuacuccauaaugugcauaaucaaagaagaaguauuagccuacguuguucaacuaccauuauauggaguuauagacacuccaugcuggaaauuacauacaagcccacucuguacaacaaacacaaaagaaggcucaaacauaugcuuaacaagaacagauagaggaugguacugcgauaacgcaggcucagucucauuuuuuccacaagccgaaaccugcaaaguacaaucaaauagaguuuuuugcgacacaaugaacucacucacucuaccaagugaaguaaaucucuguaauaucgacauauucaacccaaaauaugacugcaaaauaaugacaucuaaaaccgauguauccucaagcguaaucacaucauuaggagcuauaguuuccugcuacgguaaaacaaaaugcacagcauccaacaaaugucgcgguaucaucaaaacauucuccaacggaugugauuacguaucaaacaaaggugucgacaccguaagcguaggcaacacuuuauacuauguaaacaaacaagaaggacaaagucuauauguaaaaggagaaccaauaauaaacuucuaugacccccuaguauucccuuccgacgaauuugaugcaagcauuucacaaguuaacgaaaaaaucaaucaaucccuugcuuucauaagaaaaucagacgaauuacuacacaacguaaacguaggaaaaagcacaacaaauaucaugauuacaacaauaauaauuguaauaauaguaauacuccucuuacuuauagcagucggcuuauuccuuuacugcaaagcaagauaaggacuaguguccaccugucccuccugggcugcuggauugucucguuuuccugccaaauaaacaggaucagcgcuuuacagaucuaaaaaaaaaaaaaaaaaaaaaaaaaaaaaaaaaaaaaaaaaaaaaaaaaaaaaaaaaaaaaaaaugcaucccccccccccccccccccccccccccccccaaaggcucuuuucagagccaccagaauu

SEQ ID NO: 19819 - RNA, 1934 nt, Artificial Sequence
  mRNA product Design i-1 comprising derived and/or modified sequence from HRSV(Memphis-37)__AIY60640.1__F-del_DSCav1_mut8 (opt11)
gggagagggcgcuuggcuugcaaggacccugagcugcggcauugaagcacacccaacccaacucgacugaagucagccucacugaaccggaucugagaaucuucucucucugggcuugccagggcucuccgaaccuagcuagcauccucuucaauuccaacuagaaagcuuaccauggaacuccccauccuaaaaaccaacgcaaucaccaccauccucgccgccguaacacucugcuuugcaagcucccaaaacaucaccgaagaauuuuaccaaucuaccugcagcgccguaucuaaaggauaccuaggagcccucagaaccgguugguacaccucugucaucacaauagaacucuccaacaucaaagaaaucaaaugcaacggcaccgacgccaaagucaaacucaucaaacaagaacucgacaaauauaaaaacgccguaaccgaccuccaacuccucaugcaauccacccccgccgccggcaguggcuccgcuaucgccuccggaaucgccguuugcaaaguccugcaccuagaaggcgaagucaacaaaaucaaaaacgcccugcucucaaccaacaaagcugucguaagccucuccggcugcggagucuccguccuuaccuucaaaguacucgaccuuaaaaacuacaucgacaaacaacuucuccccauacucaauaaacaauccugcuccauacccaacaucgaaacagucaucgaguuccaacagaaaaauaaccgccuccucgaaauaacccgcgaguucuccgucaacgcaggcgucaccaccccagucuccaccuacaugcugacaaacuccgaacuccuaucccucaucaacgacaugcccaucaccaacgaccaaaagaaacucaugagcaauaacguccaaaucguacgacaacaauccuacagcaucauguguaucaucaaagaagaaguacucgccuacgucguccaacucccacuauacggcgucaucgacacaccaugcuggaaacuucacaccuccccacucugcaccacaaacacaaaagaaggcuccaacaucugccuuacccgaaccgaccgcgggugguacugcgacaacgccggaucagucucguucuuuccccaagccgaaaccugcaaaguacaaucaaaucgcgucuucugcgacaccaugaacuccuuaacacuaccauccgaaguaaaccucugcaacauagacaucuucaacccaaaauacgacugcaaaaucaugaccuccaaaaccgacguauccuccuccguaaucaccagccucggcgcaauagucucaugcuacggcaaaaccaaaugcaccgccuccaacaaaugccgcggcaucauaaaaacuuucucuaacggaugcgacuacgucagcaacaaaggcgucgacaccguauccguagguaauacacuuuacuacgucaauaaacaagaaggccaaucccucuacgucaaaggagaacccaucauaaacuucuacgacccccucgucuuccccuccgacgaguucgacgccuccaucagccaggucaacgaaaagaucaaccaaucacucgccuucauccgcaaaagcgacgaacuccuccacaacguaaacgucggcaaauccacaaccaacauaaugaucaccacuaucaucaucgugauaaucgucauuuuacuucuccucaucgccguaggccucuuccuauacugcaaagcccgcuaaggacuaguguccaccugucccuccugggcugcuggauugucucguuuuccugccaaauaaacaggaucagcgcuuuacagaucuaaaaaaaaaaaaaaaaaaaaaaaaaaaaaaaaaaaaaaaaaaaaaaaaaaaaaaaaaaaaaaaaugcaucccccccccccccccccccccccccccccccaaaggcucuuuucagagccaccagaauu

SEQ ID NO: 19820 - RNA, 1934 nt, Artificial Sequence
  mRNA product Design i-2 comprising derived and/or modified sequence from HRSV(Memphis-37)__AIY60640.1__F-del_DSCav1_mut8 (opt1)
gggagaggcgcugccuacggagguggcagccaucuccuucucggcaucaagcuuaccauggagcugcccauccucaagaccaacgccaucaccacgauccuggccgcggugacccugugcuucgccagcucccagaacaucaccgaggaguucuaccagagcacgugcuccgccgucagcaagggcuaccucggcgcccugcgcaccgggugguacaccagcgugaucaccaucgagcuguccaacaucaaggagaucaagugcaacggcaccgacgccaaggugaagcucaucaagcaggagcuggacaaguacaagaacgcggucacggaccugcagcuccugaugcagagcaccccggccgccggcuccgggagcgcgaucgccuccggcaucgccgucugcaaggugcugcaccucgagggcgaggugaacaagaucaagaacgcccugcuguccaccaacaaggccgucgugagccucuccggcugcggggugagcguccugaccuucaaggugcuggaccucaagaacuacaucgacaagcagcugcugcccauccugaacaagcagagcugcuccauccccaacaucgagaccgucaucgaguuccagcagaagaacaaccgccuccuggagaucacgcgggaguucagcgugaacgcgggcgugaccacccccgucuccaccuacaugcugacgaacagcgagcuccugucccugaucaacgacaugccgaucaccaacgaccagaagaagcucaugagcaacaacgugcagaucgugcgccagcaguccuacagcaucaugugcaucaucaaggaggagguccuggccuacguggugcagcugccccucuacggggucaucgacacccccugcuggaagcugcacaccagcccccugugcacgaccaacaccaaggagggcuccaacaucugccucacccggacggaccgcgggugguacugcgacaacgccggcagcguguccuucuucccgcaggccgagaccugcaagguccagagcaaccggguguucugcgacaccaugaacucccugacccugcccagcgaggugaaccucugcaacaucgacaucuucaaccccaaguacgacugcaagaucaugacguccaagaccgacgucagcuccagcgugaucaccucccugggcgccaucgugagcugcuacgggaagaccaagugcacggcgagcaacaagugccgcggcaucaucaagaccuucuccaacgggugcgacuacgucagcaacaagggcguggacaccguguccgucggcaacacccuguacuacgugaacaagcaggagggccagagccucuacgugaagggggagcccaucaucaacuucuacgacccgcuggucuuccccuccgacgaguucgacgccagcaucucccaggugaacgagaagaucaaccagagccuggccuucauccggaaguccgacgagcuccugcacaacgugaacgucggcaagagcaccacgaacaucaugaucaccaccaucaucaucgugaucaucgugauccugcugcuccugaucgccgucgggcuguuccucuacugcaaggcccgcugaggacuagugcaucacauuuaaaagcaucucagccuaccaugagaauaagagaaagaaaaugaagaucaauagcuuauucaucucuuuuucuuuuucguugguguaaagccaacacccugucuaaaaaacauaaauuucuuuaaucauuuugccucuuuucucugugcuucaauuaauaaaaaauggaaagaaccuagaucuaaaaaaaaaaaaaaaaaaaaaaaaaaaaaaaaaaaaaaaaaaaaaaaaaaaaaaaaaaaaaaaaugcaucccccccccccccccccccccccccccccccaaaggcucuuuucagagccaccagaauu

SEQ ID NO: 19821 - RNA, 1934 nt, Artificial Sequence
  mRNA product Design i-2 comprising derived and/or modified sequence from HRSV(Memphis-37)__AIY60640.1__F-del_DSCav1_mut8 (opt1)
gggagaggcgcugccuacggagguggcagccaucuccuucucggcaucaagcuuaccauggagcugcccauccucaagaccaacgccaucaccacgauccuggccgcggugacccugugcuucgccagcucccagaacaucaccgaggaguucuaccagagcacgugcuccgccgucagcaagggcuaccucggggcccugcgcaccggcugguacaccuccgugaucaccaucgagcugagcaacaucaaggagaucaagugcaacgggaccgacgccaaggugaagcucaucaagcaggagcuggacaaguacaagaacgcggucacggaccugcagcuccugaugcaguccaccccggccgccggcagcggguccgccaucgcgagcggcaucgccgugugcaaggugcugcaccucgagggcgaggucaacaagaucaagaacgcccugcuguccaccaacaaggccguggugagccucuccgggugcggcgucagcgugcugaccuucaaggugcuggaccucaagaacuacaucgacaagcagcugcugcccauccucaacaagcaguccugcagcauccccaacaucgagacggucaucgaguuccagcagaagaacaaccggcugcuggagaucacccgcgaguucuccgugaacgccggggugaccacccccgucagcacguacaugcucaccaacuccgagcugcugagccucaucaacgacaugccgaucaccaacgaccagaagaagcugaugagcaacaacgugcagaucgugcggcagcaguccuacagcaucaugugcaucaucaaggaggagguccuggcguacguggugcagcucccccuguacggcgucaucgacacccccugcuggaagcugcacacgagcccccucugcaccaccaacaccaaggagggguccaacaucugccugacgcgcaccgaccggggcugguacugcgacaacgccggcuccgugagcuucuucccgcaggccgagaccugcaaggugcaguccaaccgcgucuucugcgacaccaugaacagccugacgcuccccuccgaggugaaccugugcaacaucgacaucuucaaccccaaguacgacugcaagaucaugaccagcaagaccgacgucuccagcuccgugaucaccagccugggggccaucguguccugcuacggcaagacgaagugcaccgccagcaacaagugccgggggaucaucaagaccuucuccaacggcugcgacuacgucagcaacaagggcguggacaccguguccgucgggaacacgcucuacuacgugaacaagcaggagggccagagccuguacgugaagggggagcccaucaucaacuucuacgacccgcuggucuuccccagcgacgaguucgacgcguccaucagccaggugaacgagaagaucaaccagucccucgccuucauccgcaagagcgacgagcugcugcacaacgugaacgucggcaaguccaccaccaacaucaugaucaccaccaucaucaucgugaucaucgugauccuccugcugcucaucgccgucgggcuguuccuguacugcaaggcccggugaggacuagugcaucacauuuaaaagcaucucagccuaccaugagaauaagagaaagaaaaugaagaucaauagcuuauucaucucuuuuucuuuuucguugguguaaagccaacacccugucuaaaaaacauaaauuucuuuaaucauuuugccucuuuucucugugcuucaauuaauaaaaaauggaaagaaccuagaucuaaaaaaaaaaaaaaaaaaaaaaaaaaaaaaaaaaaaaaaaaaaaaaaaaaaaaaaaaaaaaaaaugcaucccccccccccccccccccccccccccccccaaaggcucuuuucagagccaccagaauu

SEQ ID NO: 19822 - RNA, 1934 nt, Artificial Sequence
  mRNA product Design i-2 comprising derived and/or modified sequence from HRSV(Memphis-37)__AIY60640.1__F-del_DSCav1_mut8 (opt2)
gggagaggcgcugccuacggagguggcagccaucuccuucucggcaucaagcuuaccauggagcuccccauccucaagaccaacgccaucaccaccauccucgccgccgucacccucugcuucgccuccucccagaacaucaccgaggaguucuaccaguccaccugcuccgccgucuccaagggcuaccucggcgcccuccgcaccggcugguacaccuccgucaucaccaucgagcucuccaacaucaaggagaucaagugcaacggcaccgacgccaaggucaagcucaucaagcaggagcucgacaaguacaagaacgccgucaccgaccuccagcuccucaugcaguccacccccgccgccggcuccggcuccgccaucgccuccggcaucgccgucugcaagguccuccaccucgagggcgaggucaacaagaucaagaacgcccuccucuccaccaacaaggccgucgucucccucuccggcugcggcgucuccguccucaccuucaagguccucgaccucaagaacuacaucgacaagcagcuccuccccauccucaacaagcaguccugcuccauccccaacaucgagaccgucaucgaguuccagcagaagaacaaccgccuccucgagaucacccgcgaguucuccgucaacgccggcgucaccacccccgucuccaccuacaugcucaccaacuccgagcuccucucccucaucaacgacaugcccaucaccaacgaccagaagaagcucauguccaacaacguccagaucguccgccagcaguccuacuccaucaugugcaucaucaaggaggagguccucgccuacgucguccagcucccccucuacggcgucaucgacacccccugcuggaagcuccacaccuccccccucugcaccaccaacaccaaggagggcuccaacaucugccucacccgcaccgaccgcggcugguacugcgacaacgccggcuccgucuccuucuucccccaggccgagaccugcaagguccaguccaaccgcgucuucugcgacaccaugaacucccucacccuccccuccgaggucaaccucugcaacaucgacaucuucaaccccaaguacgacugcaagaucaugaccuccaagaccgacgucuccuccuccgucaucaccucccucggcgccaucgucuccugcuacggcaagaccaagugcaccgccuccaacaagugccgcggcaucaucaagaccuucuccaacggcugcgacuacgucuccaacaagggcgucgacaccgucuccgucggcaacacccucuacuacgucaacaagcaggagggccagucccucuacgucaagggcgagcccaucaucaacuucuacgacccccucgucuuccccuccgacgaguucgacgccuccaucucccaggucaacgagaagaucaaccagucccucgccuucauccgcaaguccgacgagcuccuccacaacgucaacgucggcaaguccaccaccaacaucaugaucaccaccaucaucaucgucaucaucgucauccuccuccuccucaucgccgucggccucuuccucuacugcaaggcccgcugaggacuagugcaucacauuuaaaagcaucucagccuaccaugagaauaagagaaagaaaaugaagaucaauagcuuauucaucucuuuuucuuuuucguugguguaaagccaacacccugucuaaaaaacauaaauuucuuuaaucauuuugccucuuuucucugugcuucaauuaauaaaaaauggaaagaaccuagaucuaaaaaaaaaaaaaaaaaaaaaaaaaaaaaaaaaaaaaaaaaaaaaaaaaaaaaaaaaaaaaaaaugcaucccccccccccccccccccccccccccccccaaaggcucuuuucagagccaccagaauu

SEQ ID NO: 19823 - RNA, 1934 nt, Artificial Sequence
  mRNA product Design i-2 comprising derived and/or modified sequence from HRSV(Memphis-37)__AIY60640.1__F-del_DSCav1_mut8 (opt3)
gggagaggcgcugccuacggagguggcagccaucuccuucucggcaucaagcuuaccauggagcugcccauccucaagaccaacgccauuacaacuauacuugcugcagugacgcugugcuucgccagcucccagaauaucaccgaagaguuuuaccaaucuacauguucagcggucaguaaaggcuauuugggggcuuuaagaacuggaugguacaccagcguuauuacaaucgaacuguccaacauuaaggagaucaaaugcaaugguaccgacgccaaggugaaacuaauaaagcaggaacucgauaaguauaaaaacgcaguaacugaccugcagcuucugaugcagucuacuccugccgcuggcucggggucagcaaucgccagcggaauugcuguguguaaggucuugcaccucgagggcgaggugaauaaaaucaagaacgcccugcugaguaccaauaaagcgguugugucccucucugguugcggggucagcguguuaacguucaagguacuggaucuuaagaacuacauugacaaacaauugcugccaauccuaaauaagcaguccuguucaauaccgaacauugaaacuguuaucgaguuucagcagaaaaauaacaggcuccuggaaauuacccgggaguucagugugaaugcaggagucacaacucccgugagcaccuauaugcuuacaaacucugagcuguugucccucaucaaugauaugccuaucaccaacgaccaaaagaaacugaugucaaacaaugugcagauuguccgccagcagagcuacaguauaaugugcaucauuaaggaagagguuuuagccuaugugguacaacugccacucuacggcgugaucgauacgcccuguuggaaacuucauacuucuccucugugcacaaccaacacuaaggaaggcuccaauauauguuugacacgaaccgaccgugggugguacugcgauaacgcuggaagcgucucguuuuucccacaggccgagacguguaaggugcagucuaauagaguuuucugcgacaccaugaacucccuaacacugcccucagaagugaaucucugcaacauugauaucuucaauccuaaauaugacuguaagaucaugacaaguaaaaccgaugucagcuccucugugauuacaagccugggugcaaucguaucaugcuacggcaagacuaaauguaccgcuaguaacaagugcagggggauuauaaagacauuuuccaauggaugugacuauguuagcaacaaaggcguggacaccgucucuguggguaauacucuuuacuaugucaacaagcaagaggggcagucacuguacgugaaaggagagccaaucauuaauuucuaugauccguugguuuuucccagugacgaauuugaugccagcaucucccaggugaacgagaagaucaaccagucucucgcguuuauucggaaaucggacgaacuguuacacaauguaaacgucggcaagagcacgacaaauauaaugaucaccacuauuaucauugugaucauaguuauccugcuacuccugauugccgugggccuuuucuuguacugcaaggcacgcugaggacuagugcaucacauuuaaaagcaucucagccuaccaugagaauaagagaaagaaaaugaagaucaauagcuuauucaucucuuuuucuuuuucguugguguaaagccaacacccugucuaaaaaacauaaauuucuuuaaucauuuugccucuuuucucugugcuucaauuaauaaaaaauggaaagaaccuagaucuaaaaaaaaaaaaaaaaaaaaaaaaaaaaaaaaaaaaaaaaaaaaaaaaaaaaaaaaaaaaaaaaugcaucccccccccccccccccccccccccccccccaaaggcucuuuucagagccaccagaauu

SEQ ID NO: 19824 - RNA, 1934 nt, Artificial Sequence
  mRNA product Design i-2 comprising derived and/or modified sequence from HRSV(Memphis-37)__AIY60640.1__F-del_DSCav1_mut8 (opt4)
gggagaggcgcugccuacggagguggcagccaucuccuucucggcaucaagcuuaccauggagcugcccauccugaagaccaacgccaucaccaccauccuggccgccgugacccugugcuucgccagcagccagaacaucaccgaggaguucuaccagagcaccugcagcgccgugagcaagggcuaccugggcgcccugagaaccggcugguacaccagcgugaucaccaucgagcugagcaacaucaaggagaucaagugcaacggcaccgacgccaaggugaagcugaucaagcaggagcuggacaaguacaagaacgccgugaccgaccugcagcugcugaugcagagcacccccgccgccggcagcggcagcgccaucgccagcggcaucgccgugugcaaggugcugcaccuggagggcgaggugaacaagaucaagaacgcccugcugagcaccaacaaggccguggugagccugagcggcugcggcgugagcgugcugaccuucaaggugcuggaccugaagaacuacaucgacaagcagcugcugcccauccugaacaagcagagcugcagcauccccaacaucgagaccgugaucgaguuccagcagaagaacaacagacugcuggagaucaccagagaguucagcgugaacgccggcgugaccacccccgugagcaccuacaugcugaccaacagcgagcugcugagccugaucaacgacaugcccaucaccaacgaccagaagaagcugaugagcaacaacgugcagaucgugagacagcagagcuacagcaucaugugcaucaucaaggaggaggugcuggccuacguggugcagcugccccuguacggcgugaucgacacccccugcuggaagcugcacaccagcccccugugcaccaccaacaccaaggagggcagcaacaucugccugaccagaaccgacagaggcugguacugcgacaacgccggcagcgugagcuucuucccccaggccgagaccugcaaggugcagagcaacagaguguucugcgacaccaugaacagccugacccugcccagcgaggugaaccugugcaacaucgacaucuucaaccccaaguacgacugcaagaucaugaccagcaagaccgacgugagcagcagcgugaucaccagccugggcgccaucgugagcugcuacggcaagaccaagugcaccgccagcaacaagugcagaggcaucaucaagaccuucagcaacggcugcgacuacgugagcaacaagggcguggacaccgugagcgugggcaacacccuguacuacgugaacaagcaggagggccagagccuguacgugaagggcgagcccaucaucaacuucuacgacccccugguguuccccagcgacgaguucgacgccagcaucagccaggugaacgagaagaucaaccagagccuggccuucaucagaaagagcgacgagcugcugcacaacgugaacgugggcaagagcaccaccaacaucaugaucaccaccaucaucaucgugaucaucgugauccugcugcugcugaucgccgugggccuguuccuguacugcaaggccagaugaggacuagugcaucacauuuaaaagcaucucagccuaccaugagaauaagagaaagaaaaugaagaucaauagcuuauucaucucuuuuucuuuuucguugguguaaagccaacacccugucuaaaaaacauaaauuucuuuaaucauuuugccucuuuucucugugcuucaauuaauaaaaaauggaaagaaccuagaucuaaaaaaaaaaaaaaaaaaaaaaaaaaaaaaaaaaaaaaaaaaaaaaaaaaaaaaaaaaaaaaaaugcaucccccccccccccccccccccccccccccccaaaggcucuuuucagagccaccagaauu

SEQ ID NO: 19825 - RNA, 1934 nt, Artificial Sequence
  mRNA product Design i-2 comprising derived and/or modified sequence from HRSV(Memphis-37)__AIY60640.1__F-del_DSCav1_mut8 (opt5)
gggagaggcgcugccuacggagguggcagccaucuccuucucggcaucaagcuuaccauggagcugcccauccucaagaccaacgccauuacaacgauccuggcugccgugacccuuugcuucgcgagcucccagaauauuacagaagaguuuuaccaaucuaccuguagcgcugucuccaaaggcuaucugggggcccucagaacaggaugguacaccucuguuaucacaauugaacugagcaacaucaaggagaucaaaugcaauggcaccgacgccaaggugaaacuuauuaagcaggaacuggauaaguauaaaaacgcugugacggaccuccagcugcugaugcaguccaccccugccgcugggucuggaagcgccaucgcguccggcauugccgucuguaaggugcuccaccuggagggggagguuaauaaaaucaagaacgcccuucugagcacaaauaaagcuguggucucucucuccggaugcggcgugagcguucugaccuucaaggugcuugaucugaagaacuacauugacaaacaacuccugccgauccugaauaagcagucuuguuccauucccaacaucgaaacagucaucgaguuucagcagaaaaauaaccggcuccuggaaauuacccgcgaguucagcgugaaugcuggcgugacgacaccugucucuaccuauaugcuuacaaacuccgagcugcucagccugaucaaugauaugcccauuaccaacgaccaaaagaaacuuauguccaacaauguucagaucgugagacagcagucuuacagcauuaugugcaucaucaaggaagaggugcuggccuaugucgugcaacucccucuguacgggguuauugauacccccuguuggaaacugcauacauccccucucugcacgaccaacacaaaggaaggaagcaauaucugucugacccggacagaccgcggcugguacugcgauaacgcggggucuguguccuuuuucccgcaggccgagaccuguaagguccagagcaauagaguguuuugcgacacgaugaacucucuuacacugcccagcgaaguuaaucucugcaacauugauaucuucaauccuaaauaugacuguaagauuaugaccuccaaaaccgaugugucuagcuccgucaucacaagccugggagcuaucgugucuugcuacggcaagaccaaauguacagccuccaacaagugccgggggauuaucaagacguuuagcaauggaugugacuaugucucuaacaaaggcguggacaccguuuccgugggcaauacacuuuacuaugucaacaagcaagaggggcagagccuguacgugaaaggagagcccauuaucaauuucuaugauccucucguuuuucccuccgacgaguucgaugcuucuauuagccaggugaacgaaaagaucaaccagucccuggccuuuauucgcaaaucugacgaacugcuccacaaugucaacgugggcaagagcaccacaaauaucaugaucaccacgauuaucauugugaucauuguuauccugcuucugcucaucgccgucgggcuguuccuguacugcaaggcuagaugaggacuagugcaucacauuuaaaagcaucucagccuaccaugagaauaagagaaagaaaaugaagaucaauagcuuauucaucucuuuuucuuuuucguugguguaaagccaacacccugucuaaaaaacauaaauuucuuuaaucauuuugccucuuuucucugugcuucaauuaauaaaaaauggaaagaaccuagaucuaaaaaaaaaaaaaaaaaaaaaaaaaaaaaaaaaaaaaaaaaaaaaaaaaaaaaaaaaaaaaaaaugcaucccccccccccccccccccccccccccccccaaaggcucuuuucagagccaccagaauu

SEQ ID NO: 19826 - RNA, 1934 nt, Artificial Sequence
  mRNA product Design i-2 comprising derived and/or modified sequence from HRSV(Memphis-37)__AIY60640.1__F-del_DSCav1_mut8 (opt6)
gggagaggcgcugccuacggagguggcagccaucuccuucucggcaucaagcuuaccauggaacuacccauacuaaaaacaaacgcaauuacaacaauacuugccgcaguaaccuuaugcuuugccucaucccaaaacauaacagaagaauuuuaucaaucaacaugcuccgcaguaucaaaaggauaccuaggcgcucuaagaacaggaugguacacauccguaaucacaauagaacuauccaauauaaaagaaauaaaauguaauggaacagaugcaaaaguuaaauuaauaaaacaagaacuagacaaauacaaaaacgcaguuaccgaucuccaacuauuaaugcaaucaacaccagcugcaggaaguggaagcgccauagcaagcggaauagcagucugcaaaguauuacaucuugaaggcgaaguaaacaaaaucaaaaaugcccuccucucaacaaacaaagcuguaguaucccuaucaggaugcgguguaucuguucuuacauuuaaaguacucgaucuaaaaaacuacaucgauaaacaguuacuuccaauacucaacaaacaaucauguagcauaccaaacauagaaacaguaauagaauuucaacaaaaaaacaaucgacuacucgaaauaacuagagaauuuucuguaaacgcuggaguaaccacaccagugucuaccuauaugcuuacaaauagcgaacuccuaucacuaaucaaugacaugccaauaacaaaugaccagaaaaaacucaugucaaauaacguacaaauaguacgacaacaaagcuacuccauaaugugcauaaucaaagaagaaguauuagccuacguuguucaacuaccauuauauggaguuauagacacuccaugcuggaaauuacauacaagcccacucuguacaacaaacacaaaagaaggcucaaacauaugcuuaacaagaacagauagaggaugguacugcgauaacgcaggcucagucucauuuuuuccacaagccgaaaccugcaaaguacaaucaaauagaguuuuuugcgacacaaugaacucacucacucuaccaagugaaguaaaucucuguaauaucgacauauucaacccaaaauaugacugcaaaauaaugacaucuaaaaccgauguauccucaagcguaaucacaucauuaggagcuauaguuuccugcuacgguaaaacaaaaugcacagcauccaacaaaugucgcgguaucaucaaaacauucuccaacggaugugauuacguaucaaacaaaggugucgacaccguaagcguaggcaacacuuuauacuauguaaacaaacaagaaggacaaagucuauauguaaaaggagaaccaauaauaaacuucuaugacccccuaguauucccuuccgacgaauuugaugcaagcauuucacaaguuaacgaaaaaaucaaucaaucccuugcuuucauaagaaaaucagacgaauuacuacacaacguaaacguaggaaaaagcacaacaaauaucaugauuacaacaauaauaauuguaauaauaguaauacuccucuuacuuauagcagucggcuuauuccuuuacugcaaagcaagauaaggacuagugcaucacauuuaaaagcaucucagccuaccaugagaauaagagaaagaaaaugaagaucaauagcuuauucaucucuuuuucuuuuucguugguguaaagccaacacccugucuaaaaaacauaaauuucuuuaaucauuuugccucuuuucucugugcuucaauuaauaaaaaauggaaagaaccuagaucuaaaaaaaaaaaaaaaaaaaaaaaaaaaaaaaaaaaaaaaaaaaaaaaaaaaaaaaaaaaaaaaaugcaucccccccccccccccccccccccccccccccaaaggcucuuuucagagccaccagaauu

SEQ ID NO: 19827 - RNA, 1934 nt, Artificial Sequence
  mRNA product Design i-2 comprising derived and/or modified sequence from HRSV(Memphis-37)__AIY60640.1__F-del_DSCav1_mut8 (opt11)
gggagaggcgcugccuacggagguggcagccaucuccuucucggcaucaagcuuaccauggaacuccccauccuaaaaaccaacgcaaucaccaccauccucgccgccguaacacucugcuuugcaagcucccaaaacaucaccgaagaauuuuaccaaucuaccugcagcgccguaucuaaaggauaccuaggagcccucagaaccgguugguacaccucugucaucacaauagaacucuccaacaucaaagaaaucaaaugcaacggcaccgacgccaaagucaaacucaucaaacaagaacucgacaaauauaaaaacgccguaaccgaccuccaacuccucaugcaauccacccccgccgccggcaguggcuccgcuaucgccuccggaaucgccguuugcaaaguccugcaccuagaaggcgaagucaacaaaaucaaaaacgcccugcucucaaccaacaaagcugucguaagccucuccggcugcggagucuccguccuuaccuucaaaguacucgaccuuaaaaacuacaucgacaaacaacuucuccccauacucaauaaacaauccugcuccauacccaacaucgaaacagucaucgaguuccaacagaaaaauaaccgccuccucgaaauaacccgcgaguucuccgucaacgcaggcgucaccaccccagucuccaccuacaugcugacaaacuccgaacuccuaucccucaucaacgacaugcccaucaccaacgaccaaaagaaacucaugagcaauaacguccaaaucguacgacaacaauccuacagcaucauguguaucaucaaagaagaaguacucgccuacgucguccaacucccacuauacggcgucaucgacacaccaugcuggaaacuucacaccuccccacucugcaccacaaacacaaaagaaggcuccaacaucugccuuacccgaaccgaccgcgggugguacugcgacaacgccggaucagucucguucuuuccccaagccgaaaccugcaaaguacaaucaaaucgcgucuucugcgacaccaugaacuccuuaacacuaccauccgaaguaaaccucugcaacauagacaucuucaacccaaaauacgacugcaaaaucaugaccuccaaaaccgacguauccuccuccguaaucaccagccucggcgcaauagucucaugcuacggcaaaaccaaaugcaccgccuccaacaaaugccgcggcaucauaaaaacuuucucuaacggaugcgacuacgucagcaacaaaggcgucgacaccguauccguagguaauacacuuuacuacgucaauaaacaagaaggccaaucccucuacgucaaaggagaacccaucauaaacuucuacgacccccucgucuuccccuccgacgaguucgacgccuccaucagccaggucaacgaaaagaucaaccaaucacucgccuucauccgcaaaagcgacgaacuccuccacaacguaaacgucggcaaauccacaaccaacauaaugaucaccacuaucaucaucgugauaaucgucauuuuacuucuccucaucgccguaggccucuuccuauacugcaaagcccgcuaaggacuagugcaucacauuuaaaagcaucucagccuaccaugagaauaagagaaagaaaaugaagaucaauagcuuauucaucucuuuuucuuuuucguugguguaaagccaacacccugucuaaaaaacauaaauuucuuuaaucauuuugccucuuuucucugugcuucaauuaauaaaaaauggaaagaaccuagaucuaaaaaaaaaaaaaaaaaaaaaaaaaaaaaaaaaaaaaaaaaaaaaaaaaaaaaaaaaaaaaaaaugcaucccccccccccccccccccccccccccccccaaaggcucuuuucagagccaccagaauu

SEQ ID NO: 19828 - RNA, 1930 nt, Artificial Sequence
  mRNA product Design i-2 comprising derived and/or modified sequence from HRSV(Memphis-37)__AIY60640.1__F-del_DSCav1_mut8 (opt1)
ggggcgcugccuacggagguggcagccaucuccuucucggcaucaagcuuaccauggagcugcccauccucaagaccaacgccaucaccacgauccuggccgcggugacccugugcuucgccagcucccagaacaucaccgaggaguucuaccagagcacgugcuccgccgucagcaagggcuaccucggcgcccugcgcaccgggugguacaccagcgugaucaccaucgagcuguccaacaucaaggagaucaagugcaacggcaccgacgccaaggugaagcucaucaagcaggagcuggacaaguacaagaacgcggucacggaccugcagcuccugaugcagagcaccccggccgccggcuccgggagcgcgaucgccuccggcaucgccgucugcaaggugcugcaccucgagggcgaggugaacaagaucaagaacgcccugcuguccaccaacaaggccgucgugagccucuccggcugcggggugagcguccugaccuucaaggugcuggaccucaagaacuacaucgacaagcagcugcugcccauccugaacaagcagagcugcuccauccccaacaucgagaccgucaucgaguuccagcagaagaacaaccgccuccuggagaucacgcgggaguucagcgugaacgcgggcgugaccacccccgucuccaccuacaugcugacgaacagcgagcuccugucccugaucaacgacaugccgaucaccaacgaccagaagaagcucaugagcaacaacgugcagaucgugcgccagcaguccuacagcaucaugugcaucaucaaggaggagguccuggccuacguggugcagcugccccucuacggggucaucgacacccccugcuggaagcugcacaccagcccccugugcacgaccaacaccaaggagggcuccaacaucugccucacccggacggaccgcgggugguacugcgacaacgccggcagcguguccuucuucccgcaggccgagaccugcaagguccagagcaaccggguguucugcgacaccaugaacucccugacccugcccagcgaggugaaccucugcaacaucgacaucuucaaccccaaguacgacugcaagaucaugacguccaagaccgacgucagcuccagcgugaucaccucccugggcgccaucgugagcugcuacgggaagaccaagugcacggcgagcaacaagugccgcggcaucaucaagaccuucuccaacgggugcgacuacgucagcaacaagggcguggacaccguguccgucggcaacacccuguacuacgugaacaagcaggagggccagagccucuacgugaagggggagcccaucaucaacuucuacgacccgcuggucuuccccuccgacgaguucgacgccagcaucucccaggugaacgagaagaucaaccagagccuggccuucauccggaaguccgacgagcuccugcacaacgugaacgucggcaagagcaccacgaacaucaugaucaccaccaucaucaucgugaucaucgugauccugcugcuccugaucgccgucgggcuguuccucuacugcaaggcccgcugaggacuagugcaucacauuuaaaagcaucucagccuaccaugagaauaagagaaagaaaaugaagaucaauagcuuauucaucucuuuuucuuuuucguugguguaaagccaacacccugucuaaaaaacauaaauuucuuuaaucauuuugccucuuuucucugugcuucaauuaauaaaaaauggaaagaaccuagaucuaaaaaaaaaaaaaaaaaaaaaaaaaaaaaaaaaaaaaaaaaaaaaaaaaaaaaaaaaaaaaaaaugcaucccccccccccccccccccccccccccccccaaaggcucuuuucagagccaccagaauu

SEQ ID NO: 19829 - RNA, 1930 nt, Artificial Sequence
  mRNA product Design i-2 comprising derived and/or modified sequence from HRSV(Memphis-37)__AIY60640.1__F-del_DSCav1_mut8 (opt1)
ggggcgcugccuacggagguggcagccaucuccuucucggcaucaagcuuaccauggagcugcccauccucaagaccaacgccaucaccacgauccuggccgcggugacccugugcuucgccagcucccagaacaucaccgaggaguucuaccagagcacgugcuccgccgucagcaagggcuaccucggggcccugcgcaccggcugguacaccuccgugaucaccaucgagcugagcaacaucaaggagaucaagugcaacgggaccgacgccaaggugaagcucaucaagcaggagcuggacaaguacaagaacgcggucacggaccugcagcuccugaugcaguccaccccggccgccggcagcggguccgccaucgcgagcggcaucgccgugugcaaggugcugcaccucgagggcgaggucaacaagaucaagaacgcccugcuguccaccaacaaggccguggugagccucuccgggugcggcgucagcgugcugaccuucaaggugcuggaccucaagaacuacaucgacaagcagcugcugcccauccucaacaagcaguccugcagcauccccaacaucgagacggucaucgaguuccagcagaagaacaaccggcugcuggagaucacccgcgaguucuccgugaacgccggggugaccacccccgucagcacguacaugcucaccaacuccgagcugcugagccucaucaacgacaugccgaucaccaacgaccagaagaagcugaugagcaacaacgugcagaucgugcggcagcaguccuacagcaucaugugcaucaucaaggaggagguccuggcguacguggugcagcucccccuguacggcgucaucgacacccccugcuggaagcugcacacgagcccccucugcaccaccaacaccaaggagggguccaacaucugccugacgcgcaccgaccggggcugguacugcgacaacgccggcuccgugagcuucuucccgcaggccgagaccugcaaggugcaguccaaccgcgucuucugcgacaccaugaacagccugacgcuccccuccgaggugaaccugugcaacaucgacaucuucaaccccaaguacgacugcaagaucaugaccagcaagaccgacgucuccagcuccgugaucaccagccugggggccaucguguccugcuacggcaagacgaagugcaccgccagcaacaagugccgggggaucaucaagaccuucuccaacggcugcgacuacgucagcaacaagggcguggacaccguguccgucgggaacacgcucuacuacgugaacaagcaggagggccagagccuguacgugaagggggagcccaucaucaacuucuacgacccgcuggucuuccccagcgacgaguucgacgcguccaucagccaggugaacgagaagaucaaccagucccucgccuucauccgcaagagcgacgagcugcugcacaacgugaacgucggcaaguccaccaccaacaucaugaucaccaccaucaucaucgugaucaucgugauccuccugcugcucaucgccgucgggcuguuccuguacugcaaggcccggugaggacuagugcaucacauuuaaaagcaucucagccuaccaugagaauaagagaaagaaaaugaagaucaauagcuuauucaucucuuuuucuuuuucguugguguaaagccaacacccugucuaaaaaacauaaauuucuuuaaucauuuugccucuuuucucugugcuucaauuaauaaaaaauggaaagaaccuagaucuaaaaaaaaaaaaaaaaaaaaaaaaaaaaaaaaaaaaaaaaaaaaaaaaaaaaaaaaaaaaaaaaugcaucccccccccccccccccccccccccccccccaaaggcucuuuucagagccaccagaauu

SEQ ID NO: 19830 - RNA, 1930 nt, Artificial Sequence
  mRNA product Design i-2 comprising derived and/or modified sequence from HRSV(Memphis-37)__AIY60640.1__F-del_DSCav1_mut8 (opt2)
ggggcgcugccuacggagguggcagccaucuccuucucggcaucaagcuuaccauggagcuccccauccucaagaccaacgccaucaccaccauccucgccgccgucacccucugcuucgccuccucccagaacaucaccgaggaguucuaccaguccaccugcuccgccgucuccaagggcuaccucggcgcccuccgcaccggcugguacaccuccgucaucaccaucgagcucuccaacaucaaggagaucaagugcaacggcaccgacgccaaggucaagcucaucaagcaggagcucgacaaguacaagaacgccgucaccgaccuccagcuccucaugcaguccacccccgccgccggcuccggcuccgccaucgccuccggcaucgccgucugcaagguccuccaccucgagggcgaggucaacaagaucaagaacgcccuccucuccaccaacaaggccgucgucucccucuccggcugcggcgucuccguccucaccuucaagguccucgaccucaagaacuacaucgacaagcagcuccuccccauccucaacaagcaguccugcuccauccccaacaucgagaccgucaucgaguuccagcagaagaacaaccgccuccucgagaucacccgcgaguucuccgucaacgccggcgucaccacccccgucuccaccuacaugcucaccaacuccgagcuccucucccucaucaacgacaugcccaucaccaacgaccagaagaagcucauguccaacaacguccagaucguccgccagcaguccuacuccaucaugugcaucaucaaggaggagguccucgccuacgucguccagcucccccucuacggcgucaucgacacccccugcuggaagcuccacaccuccccccucugcaccaccaacaccaaggagggcuccaacaucugccucacccgcaccgaccgcggcugguacugcgacaacgccggcuccgucuccuucuucccccaggccgagaccugcaagguccaguccaaccgcgucuucugcgacaccaugaacucccucacccuccccuccgaggucaaccucugcaacaucgacaucuucaaccccaaguacgacugcaagaucaugaccuccaagaccgacgucuccuccuccgucaucaccucccucggcgccaucgucuccugcuacggcaagaccaagugcaccgccuccaacaagugccgcggcaucaucaagaccuucuccaacggcugcgacuacgucuccaacaagggcgucgacaccgucuccgucggcaacacccucuacuacgucaacaagcaggagggccagucccucuacgucaagggcgagcccaucaucaacuucuacgacccccucgucuuccccuccgacgaguucgacgccuccaucucccaggucaacgagaagaucaaccagucccucgccuucauccgcaaguccgacgagcuccuccacaacgucaacgucggcaaguccaccaccaacaucaugaucaccaccaucaucaucgucaucaucgucauccuccuccuccucaucgccgucggccucuuccucuacugcaaggcccgcugaggacuagugcaucacauuuaaaagcaucucagccuaccaugagaauaagagaaagaaaaugaagaucaauagcuuauucaucucuuuuucuuuuucguugguguaaagccaacacccugucuaaaaaacauaaauuucuuuaaucauuuugccucuuuucucugugcuucaauuaauaaaaaauggaaagaaccuagaucuaaaaaaaaaaaaaaaaaaaaaaaaaaaaaaaaaaaaaaaaaaaaaaaaaaaaaaaaaaaaaaaaugcaucccccccccccccccccccccccccccccccaaaggcucuuuucagagccaccagaauu

SEQ ID NO: 19831 - RNA, 1930 nt, Artificial Sequence
  mRNA product Design i-2 comprising derived and/or modified sequence from HRSV(Memphis-37)__AIY60640.1__F-del_DSCav1_mut8 (opt3)
ggggcgcugccuacggagguggcagccaucuccuucucggcaucaagcuuaccauggagcugcccauccucaagaccaacgccauuacaacuauacuugcugcagugacgcugugcuucgccagcucccagaauaucaccgaagaguuuuaccaaucuacauguucagcggucaguaaaggcuauuugggggcuuuaagaacuggaugguacaccagcguuauuacaaucgaacuguccaacauuaaggagaucaaaugcaaugguaccgacgccaaggugaaacuaauaaagcaggaacucgauaaguauaaaaacgcaguaacugaccugcagcuucugaugcagucuacuccugccgcuggcucggggucagcaaucgccagcggaauugcuguguguaaggucuugcaccucgagggcgaggugaauaaaaucaagaacgcccugcugaguaccaauaaagcgguugugucccucucugguugcggggucagcguguuaacguucaagguacuggaucuuaagaacuacauugacaaacaauugcugccaauccuaaauaagcaguccuguucaauaccgaacauugaaacuguuaucgaguuucagcagaaaaauaacaggcuccuggaaauuacccgggaguucagugugaaugcaggagucacaacucccgugagcaccuauaugcuuacaaacucugagcuguugucccucaucaaugauaugccuaucaccaacgaccaaaagaaacugaugucaaacaaugugcagauuguccgccagcagagcuacaguauaaugugcaucauuaaggaagagguuuuagccuaugugguacaacugccacucuacggcgugaucgauacgcccuguuggaaacuucauacuucuccucugugcacaaccaacacuaaggaaggcuccaauauauguuugacacgaaccgaccgugggugguacugcgauaacgcuggaagcgucucguuuuucccacaggccgagacguguaaggugcagucuaauagaguuuucugcgacaccaugaacucccuaacacugcccucagaagugaaucucugcaacauugauaucuucaauccuaaauaugacuguaagaucaugacaaguaaaaccgaugucagcuccucugugauuacaagccugggugcaaucguaucaugcuacggcaagacuaaauguaccgcuaguaacaagugcagggggauuauaaagacauuuuccaauggaugugacuauguuagcaacaaaggcguggacaccgucucuguggguaauacucuuuacuaugucaacaagcaagaggggcagucacuguacgugaaaggagagccaaucauuaauuucuaugauccguugguuuuucccagugacgaauuugaugccagcaucucccaggugaacgagaagaucaaccagucucucgcguuuauucggaaaucggacgaacuguuacacaauguaaacgucggcaagagcacgacaaauauaaugaucaccacuauuaucauugugaucauaguuauccugcuacuccugauugccgugggccuuuucuuguacugcaaggcacgcugaggacuagugcaucacauuuaaaagcaucucagccuaccaugagaauaagagaaagaaaaugaagaucaauagcuuauucaucucuuuuucuuuuucguugguguaaagccaacacccugucuaaaaaacauaaauuucuuuaaucauuuugccucuuuucucugugcuucaauuaauaaaaaauggaaagaaccuagaucuaaaaaaaaaaaaaaaaaaaaaaaaaaaaaaaaaaaaaaaaaaaaaaaaaaaaaaaaaaaaaaaaugcaucccccccccccccccccccccccccccccccaaaggcucuuuucagagccaccagaauu

SEQ ID NO: 19832 - RNA, 1930 nt, Artificial Sequence
  mRNA product Design i-2 comprising derived and/or modified sequence from HRSV(Memphis-37)__AIY60640.1__F-del_DSCav1_mut8 (opt4)
ggggcgcugccuacggagguggcagccaucuccuucucggcaucaagcuuaccauggagcugcccauccugaagaccaacgccaucaccaccauccuggccgccgugacccugugcuucgccagcagccagaacaucaccgaggaguucuaccagagcaccugcagcgccgugagcaagggcuaccugggcgcccugagaaccggcugguacaccagcgugaucaccaucgagcugagcaacaucaaggagaucaagugcaacggcaccgacgccaaggugaagcugaucaagcaggagcuggacaaguacaagaacgccgugaccgaccugcagcugcugaugcagagcacccccgccgccggcagcggcagcgccaucgccagcggcaucgccgugugcaaggugcugcaccuggagggcgaggugaacaagaucaagaacgcccugcugagcaccaacaaggccguggugagccugagcggcugcggcgugagcgugcugaccuucaaggugcuggaccugaagaacuacaucgacaagcagcugcugcccauccugaacaagcagagcugcagcauccccaacaucgagaccgugaucgaguuccagcagaagaacaacagacugcuggagaucaccagagaguucagcgugaacgccggcgugaccacccccgugagcaccuacaugcugaccaacagcgagcugcugagccugaucaacgacaugcccaucaccaacgaccagaagaagcugaugagcaacaacgugcagaucgugagacagcagagcuacagcaucaugugcaucaucaaggaggaggugcuggccuacguggugcagcugccccuguacggcgugaucgacacccccugcuggaagcugcacaccagcccccugugcaccaccaacaccaaggagggcagcaacaucugccugaccagaaccgacagaggcugguacugcgacaacgccggcagcgugagcuucuucccccaggccgagaccugcaaggugcagagcaacagaguguucugcgacaccaugaacagccugacccugcccagcgaggugaaccugugcaacaucgacaucuucaaccccaaguacgacugcaagaucaugaccagcaagaccgacgugagcagcagcgugaucaccagccugggcgccaucgugagcugcuacggcaagaccaagugcaccgccagcaacaagugcagaggcaucaucaagaccuucagcaacggcugcgacuacgugagcaacaagggcguggacaccgugagcgugggcaacacccuguacuacgugaacaagcaggagggccagagccuguacgugaagggcgagcccaucaucaacuucuacgacccccugguguuccccagcgacgaguucgacgccagcaucagccaggugaacgagaagaucaaccagagccuggccuucaucagaaagagcgacgagcugcugcacaacgugaacgugggcaagagcaccaccaacaucaugaucaccaccaucaucaucgugaucaucgugauccugcugcugcugaucgccgugggccuguuccuguacugcaaggccagaugaggacuagugcaucacauuuaaaagcaucucagccuaccaugagaauaagagaaagaaaaugaagaucaauagcuuauucaucucuuuuucuuuuucguugguguaaagccaacacccugucuaaaaaacauaaauuucuuuaaucauuuugccucuuuucucugugcuucaauuaauaaaaaauggaaagaaccuagaucuaaaaaaaaaaaaaaaaaaaaaaaaaaaaaaaaaaaaaaaaaaaaaaaaaaaaaaaaaaaaaaaaugcaucccccccccccccccccccccccccccccccaaaggcucuuuucagagccaccagaauu

SEQ ID NO: 19833 - RNA, 1930 nt, Artificial Sequence
  mRNA product Design i-2 comprising derived and/or modified sequence from HRSV(Memphis-37)__AIY60640.1__F-del_DSCav1_mut8 (opt5)
ggggcgcugccuacggagguggcagccaucuccuucucggcaucaagcuuaccauggagcugcccauccucaagaccaacgccauuacaacgauccuggcugccgugacccuuugcuucgcgagcucccagaauauuacagaagaguuuuaccaaucuaccuguagcgcugucuccaaaggcuaucugggggcccucagaacaggaugguacaccucuguuaucacaauugaacugagcaacaucaaggagaucaaaugcaauggcaccgacgccaaggugaaacuuauuaagcaggaacuggauaaguauaaaaacgcugugacggaccuccagcugcugaugcaguccaccccugccgcugggucuggaagcgccaucgcguccggcauugccgucuguaaggugcuccaccuggagggggagguuaauaaaaucaagaacgcccuucugagcacaaauaaagcuguggucucucucuccggaugcggcgugagcguucugaccuucaaggugcuugaucugaagaacuacauugacaaacaacuccugccgauccugaauaagcagucuuguuccauucccaacaucgaaacagucaucgaguuucagcagaaaaauaaccggcuccuggaaauuacccgcgaguucagcgugaaugcuggcgugacgacaccugucucuaccuauaugcuuacaaacuccgagcugcucagccugaucaaugauaugcccauuaccaacgaccaaaagaaacuuauguccaacaauguucagaucgugagacagcagucuuacagcauuaugugcaucaucaaggaagaggugcuggccuaugucgugcaacucccucuguacgggguuauugauacccccuguuggaaacugcauacauccccucucugcacgaccaacacaaaggaaggaagcaauaucugucugacccggacagaccgcggcugguacugcgauaacgcggggucuguguccuuuuucccgcaggccgagaccuguaagguccagagcaauagaguguuuugcgacacgaugaacucucuuacacugcccagcgaaguuaaucucugcaacauugauaucuucaauccuaaauaugacuguaagauuaugaccuccaaaaccgaugugucuagcuccgucaucacaagccugggagcuaucgugucuugcuacggcaagaccaaauguacagccuccaacaagugccgggggauuaucaagacguuuagcaauggaugugacuaugucucuaacaaaggcguggacaccguuuccgugggcaauacacuuuacuaugucaacaagcaagaggggcagagccuguacgugaaaggagagcccauuaucaauuucuaugauccucucguuuuucccuccgacgaguucgaugcuucuauuagccaggugaacgaaaagaucaaccagucccuggccuuuauucgcaaaucugacgaacugcuccacaaugucaacgugggcaagagcaccacaaauaucaugaucaccacgauuaucauugugaucauuguuauccugcuucugcucaucgccgucgggcuguuccuguacugcaaggcuagaugaggacuagugcaucacauuuaaaagcaucucagccuaccaugagaauaagagaaagaaaaugaagaucaauagcuuauucaucucuuuuucuuuuucguugguguaaagccaacacccugucuaaaaaacauaaauuucuuuaaucauuuugccucuuuucucugugcuucaauuaauaaaaaauggaaagaaccuagaucuaaaaaaaaaaaaaaaaaaaaaaaaaaaaaaaaaaaaaaaaaaaaaaaaaaaaaaaaaaaaaaaaugcaucccccccccccccccccccccccccccccccaaaggcucuuuucagagccaccagaauu

SEQ ID NO: 19834 - RNA, 1930 nt, Artificial Sequence
  mRNA product Design i-2 comprising derived and/or modified sequence from HRSV(Memphis-37)__AIY60640.1__F-del_DSCav1_mut8 (opt6)
ggggcgcugccuacggagguggcagccaucuccuucucggcaucaagcuuaccauggaacuacccauacuaaaaacaaacgcaauuacaacaauacuugccgcaguaaccuuaugcuuugccucaucccaaaacauaacagaagaauuuuaucaaucaacaugcuccgcaguaucaaaaggauaccuaggcgcucuaagaacaggaugguacacauccguaaucacaauagaacuauccaauauaaaagaaauaaaauguaauggaacagaugcaaaaguuaaauuaauaaaacaagaacuagacaaauacaaaaacgcaguuaccgaucuccaacuauuaaugcaaucaacaccagcugcaggaaguggaagcgccauagcaagcggaauagcagucugcaaaguauuacaucuugaaggcgaaguaaacaaaaucaaaaaugcccuccucucaacaaacaaagcuguaguaucccuaucaggaugcgguguaucuguucuuacauuuaaaguacucgaucuaaaaaacuacaucgauaaacaguuacuuccaauacucaacaaacaaucauguagcauaccaaacauagaaacaguaauagaauuucaacaaaaaaacaaucgacuacucgaaauaacuagagaauuuucuguaaacgcuggaguaaccacaccagugucuaccuauaugcuuacaaauagcgaacuccuaucacuaaucaaugacaugccaauaacaaaugaccagaaaaaacucaugucaaauaacguacaaauaguacgacaacaaagcuacuccauaaugugcauaaucaaagaagaaguauuagccuacguuguucaacuaccauuauauggaguuauagacacuccaugcuggaaauuacauacaagcccacucuguacaacaaacacaaaagaaggcucaaacauaugcuuaacaagaacagauagaggaugguacugcgauaacgcaggcucagucucauuuuuuccacaagccgaaaccugcaaaguacaaucaaauagaguuuuuugcgacacaaugaacucacucacucuaccaagugaaguaaaucucuguaauaucgacauauucaacccaaaauaugacugcaaaauaaugacaucuaaaaccgauguauccucaagcguaaucacaucauuaggagcuauaguuuccugcuacgguaaaacaaaaugcacagcauccaacaaaugucgcgguaucaucaaaacauucuccaacggaugugauuacguaucaaacaaaggugucgacaccguaagcguaggcaacacuuuauacuauguaaacaaacaagaaggacaaagucuauauguaaaaggagaaccaauaauaaacuucuaugacccccuaguauucccuuccgacgaauuugaugcaagcauuucacaaguuaacgaaaaaaucaaucaaucccuugcuuucauaagaaaaucagacgaauuacuacacaacguaaacguaggaaaaagcacaacaaauaucaugauuacaacaauaauaauuguaauaauaguaauacuccucuuacuuauagcagucggcuuauuccuuuacugcaaagcaagauaaggacuagugcaucacauuuaaaagcaucucagccuaccaugagaauaagagaaagaaaaugaagaucaauagcuuauucaucucuuuuucuuuuucguugguguaaagccaacacccugucuaaaaaacauaaauuucuuuaaucauuuugccucuuuucucugugcuucaauuaauaaaaaauggaaagaaccuagaucuaaaaaaaaaaaaaaaaaaaaaaaaaaaaaaaaaaaaaaaaaaaaaaaaaaaaaaaaaaaaaaaaugcaucccccccccccccccccccccccccccccccaaaggcucuuuucagagccaccagaauu

SEQ ID NO: 19835 - RNA, 1930 nt, Artificial Sequence
  mRNA product Design i-2 comprising derived and/or modified sequence from HRSV(Memphis-37)__AIY60640.1__F-del_DSCav1_mut8 (opt11)
ggggcgcugccuacggagguggcagccaucuccuucucggcaucaagcuuaccauggaacuccccauccuaaaaaccaacgcaaucaccaccauccucgccgccguaacacucugcuuugcaagcucccaaaacaucaccgaagaauuuuaccaaucuaccugcagcgccguaucuaaaggauaccuaggagcccucagaaccgguugguacaccucugucaucacaauagaacucuccaacaucaaagaaaucaaaugcaacggcaccgacgccaaagucaaacucaucaaacaagaacucgacaaauauaaaaacgccguaaccgaccuccaacuccucaugcaauccacccccgccgccggcaguggcuccgcuaucgccuccggaaucgccguuugcaaaguccugcaccuagaaggcgaagucaacaaaaucaaaaacgcccugcucucaaccaacaaagcugucguaagccucuccggcugcggagucuccguccuuaccuucaaaguacucgaccuuaaaaacuacaucgacaaacaacuucuccccauacucaauaaacaauccugcuccauacccaacaucgaaacagucaucgaguuccaacagaaaaauaaccgccuccucgaaauaacccgcgaguucuccgucaacgcaggcgucaccaccccagucuccaccuacaugcugacaaacuccgaacuccuaucccucaucaacgacaugcccaucaccaacgaccaaaagaaacucaugagcaauaacguccaaaucguacgacaacaauccuacagcaucauguguaucaucaaagaagaaguacucgccuacgucguccaacucccacuauacggcgucaucgacacaccaugcuggaaacuucacaccuccccacucugcaccacaaacacaaaagaaggcuccaacaucugccuuacccgaaccgaccgcgggugguacugcgacaacgccggaucagucucguucuuuccccaagccgaaaccugcaaaguacaaucaaaucgcgucuucugcgacaccaugaacuccuuaacacuaccauccgaaguaaaccucugcaacauagacaucuucaacccaaaauacgacugcaaaaucaugaccuccaaaaccgacguauccuccuccguaaucaccagccucggcgcaauagucucaugcuacggcaaaaccaaaugcaccgccuccaacaaaugccgcggcaucauaaaaacuuucucuaacggaugcgacuacgucagcaacaaaggcgucgacaccguauccguagguaauacacuuuacuacgucaauaaacaagaaggccaaucccucuacgucaaaggagaacccaucauaaacuucuacgacccccucgucuuccccuccgacgaguucgacgccuccaucagccaggucaacgaaaagaucaaccaaucacucgccuucauccgcaaaagcgacgaacuccuccacaacguaaacgucggcaaauccacaaccaacauaaugaucaccacuaucaucaucgugauaaucgucauuuuacuucuccucaucgccguaggccucuuccuauacugcaaagcccgcuaaggacuagugcaucacauuuaaaagcaucucagccuaccaugagaauaagagaaagaaaaugaagaucaauagcuuauucaucucuuuuucuuuuucguugguguaaagccaacacccugucuaaaaaacauaaauuucuuuaaucauuuugccucuuuucucugugcuucaauuaauaaaaaauggaaagaaccuagaucuaaaaaaaaaaaaaaaaaaaaaaaaaaaaaaaaaaaaaaaaaaaaaaaaaaaaaaaaaaaaaaaaugcaucccccccccccccccccccccccccccccccaaaggcucuuuucagagccaccagaauu

SEQ ID NO: 19836 - RNA, 1765 nt, Artificial Sequence
  mRNA product Design i-3 comprising derived and/or modified sequence from HRSV(Memphis-37)__AIY60640.1__F-del_DSCav1_mut8 (opt1)
gggagaaagcuuaccauggagcugcccauccucaagaccaacgccaucaccacgauccuggccgcggugacccugugcuucgccagcucccagaacaucaccgaggaguucuaccagagcacgugcuccgccgucagcaagggcuaccucggcgcccugcgcaccgggugguacaccagcgugaucaccaucgagcuguccaacaucaaggagaucaagugcaacggcaccgacgccaaggugaagcucaucaagcaggagcuggacaaguacaagaacgcggucacggaccugcagcuccugaugcagagcaccccggccgccggcuccgggagcgcgaucgccuccggcaucgccgucugcaaggugcugcaccucgagggcgaggugaacaagaucaagaacgcccugcuguccaccaacaaggccgucgugagccucuccggcugcggggugagcguccugaccuucaaggugcuggaccucaagaacuacaucgacaagcagcugcugcccauccugaacaagcagagcugcuccauccccaacaucgagaccgucaucgaguuccagcagaagaacaaccgccuccuggagaucacgcgggaguucagcgugaacgcgggcgugaccacccccgucuccaccuacaugcugacgaacagcgagcuccugucccugaucaacgacaugccgaucaccaacgaccagaagaagcucaugagcaacaacgugcagaucgugcgccagcaguccuacagcaucaugugcaucaucaaggaggagguccuggccuacguggugcagcugccccucuacggggucaucgacacccccugcuggaagcugcacaccagcccccugugcacgaccaacaccaaggagggcuccaacaucugccucacccggacggaccgcgggugguacugcgacaacgccggcagcguguccuucuucccgcaggccgagaccugcaagguccagagcaaccggguguucugcgacaccaugaacucccugacccugcccagcgaggugaaccucugcaacaucgacaucuucaaccccaaguacgacugcaagaucaugacguccaagaccgacgucagcuccagcgugaucaccucccugggcgccaucgugagcugcuacgggaagaccaagugcacggcgagcaacaagugccgcggcaucaucaagaccuucuccaacgggugcgacuacgucagcaacaagggcguggacaccguguccgucggcaacacccuguacuacgugaacaagcaggagggccagagccucuacgugaagggggagcccaucaucaacuucuacgacccgcuggucuuccccuccgacgaguucgacgccagcaucucccaggugaacgagaagaucaaccagagccuggccuucauccggaaguccgacgagcuccugcacaacgugaacgucggcaagagcaccacgaacaucaugaucaccaccaucaucaucgugaucaucgugauccugcugcuccugaucgccgucgggcuguuccucuacugcaaggcccgcugaggacuaguuauaagacugacuagcccgaugggccucccaacgggcccuccuccccuccuugcaccgagauuaauaaaaaaaaaaaaaaaaaaaaaaaaaaaaaaaaaaaaaaaaaaaaaaaaaaaaaaaaaaaaaaaaugcaucccccccccccccccccccccccccccccccaaaggcucuuuucagagccaccagaauu

SEQ ID NO: 19837 - RNA, 1765 nt, Artificial Sequence
  mRNA product Design i-3 comprising derived and/or modified sequence from HRSV(Memphis-37)__AIY60640.1__F-del_DSCav1_mut8 (opt1)
gggagaaagcuuaccauggagcugcccauccucaagaccaacgccaucaccacgauccuggccgcggugacccugugcuucgccagcucccagaacaucaccgaggaguucuaccagagcacgugcuccgccgucagcaagggcuaccucggggcccugcgcaccggcugguacaccuccgugaucaccaucgagcugagcaacaucaaggagaucaagugcaacgggaccgacgccaaggugaagcucaucaagcaggagcuggacaaguacaagaacgcggucacggaccugcagcuccugaugcaguccaccccggccgccggcagcggguccgccaucgcgagcggcaucgccgugugcaaggugcugcaccucgagggcgaggucaacaagaucaagaacgcccugcuguccaccaacaaggccguggugagccucuccgggugcggcgucagcgugcugaccuucaaggugcuggaccucaagaacuacaucgacaagcagcugcugcccauccucaacaagcaguccugcagcauccccaacaucgagacggucaucgaguuccagcagaagaacaaccggcugcuggagaucacccgcgaguucuccgugaacgccggggugaccacccccgucagcacguacaugcucaccaacuccgagcugcugagccucaucaacgacaugccgaucaccaacgaccagaagaagcugaugagcaacaacgugcagaucgugcggcagcaguccuacagcaucaugugcaucaucaaggaggagguccuggcguacguggugcagcucccccuguacggcgucaucgacacccccugcuggaagcugcacacgagcccccucugcaccaccaacaccaaggagggguccaacaucugccugacgcgcaccgaccggggcugguacugcgacaacgccggcuccgugagcuucuucccgcaggccgagaccugcaaggugcaguccaaccgcgucuucugcgacaccaugaacagccugacgcuccccuccgaggugaaccugugcaacaucgacaucuucaaccccaaguacgacugcaagaucaugaccagcaagaccgacgucuccagcuccgugaucaccagccugggggccaucguguccugcuacggcaagacgaagugcaccgccagcaacaagugccgggggaucaucaagaccuucuccaacggcugcgacuacgucagcaacaagggcguggacaccguguccgucgggaacacgcucuacuacgugaacaagcaggagggccagagccuguacgugaagggggagcccaucaucaacuucuacgacccgcuggucuuccccagcgacgaguucgacgcguccaucagccaggugaacgagaagaucaaccagucccucgccuucauccgcaagagcgacgagcugcugcacaacgugaacgucggcaaguccaccaccaacaucaugaucaccaccaucaucaucgugaucaucgugauccuccugcugcucaucgccgucgggcuguuccuguacugcaaggcccggugaggacuaguuauaagacugacuagcccgaugggccucccaacgggcccuccuccccuccuugcaccgagauuaauaaaaaaaaaaaaaaaaaaaaaaaaaaaaaaaaaaaaaaaaaaaaaaaaaaaaaaaaaaaaaaaaugcaucccccccccccccccccccccccccccccccaaaggcucuuuucagagccaccagaauu

SEQ ID NO: 19838 - RNA, 1765 nt, Artificial Sequence
  mRNA product Design i-3 comprising derived and/or modified sequence from HRSV(Memphis-37)__AIY60640.1__F-del_DSCav1_mut8 (opt2)
gggagaaagcuuaccauggagcuccccauccucaagaccaacgccaucaccaccauccucgccgccgucacccucugcuucgccuccucccagaacaucaccgaggaguucuaccaguccaccugcuccgccgucuccaagggcuaccucggcgcccuccgcaccggcugguacaccuccgucaucaccaucgagcucuccaacaucaaggagaucaagugcaacggcaccgacgccaaggucaagcucaucaagcaggagcucgacaaguacaagaacgccgucaccgaccuccagcuccucaugcaguccacccccgccgccggcuccggcuccgccaucgccuccggcaucgccgucugcaagguccuccaccucgagggcgaggucaacaagaucaagaacgcccuccucuccaccaacaaggccgucgucucccucuccggcugcggcgucuccguccucaccuucaagguccucgaccucaagaacuacaucgacaagcagcuccuccccauccucaacaagcaguccugcuccauccccaacaucgagaccgucaucgaguuccagcagaagaacaaccgccuccucgagaucacccgcgaguucuccgucaacgccggcgucaccacccccgucuccaccuacaugcucaccaacuccgagcuccucucccucaucaacgacaugcccaucaccaacgaccagaagaagcucauguccaacaacguccagaucguccgccagcaguccuacuccaucaugugcaucaucaaggaggagguccucgccuacgucguccagcucccccucuacggcgucaucgacacccccugcuggaagcuccacaccuccccccucugcaccaccaacaccaaggagggcuccaacaucugccucacccgcaccgaccgcggcugguacugcgacaacgccggcuccgucuccuucuucccccaggccgagaccugcaagguccaguccaaccgcgucuucugcgacaccaugaacucccucacccuccccuccgaggucaaccucugcaacaucgacaucuucaaccccaaguacgacugcaagaucaugaccuccaagaccgacgucuccuccuccgucaucaccucccucggcgccaucgucuccugcuacggcaagaccaagugcaccgccuccaacaagugccgcggcaucaucaagaccuucuccaacggcugcgacuacgucuccaacaagggcgucgacaccgucuccgucggcaacacccucuacuacgucaacaagcaggagggccagucccucuacgucaagggcgagcccaucaucaacuucuacgacccccucgucuuccccuccgacgaguucgacgccuccaucucccaggucaacgagaagaucaaccagucccucgccuucauccgcaaguccgacgagcuccuccacaacgucaacgucggcaaguccaccaccaacaucaugaucaccaccaucaucaucgucaucaucgucauccuccuccuccucaucgccgucggccucuuccucuacugcaaggcccgcugaggacuaguuauaagacugacuagcccgaugggccucccaacgggcccuccuccccuccuugcaccgagauuaauaaaaaaaaaaaaaaaaaaaaaaaaaaaaaaaaaaaaaaaaaaaaaaaaaaaaaaaaaaaaaaaaugcaucccccccccccccccccccccccccccccccaaaggcucuuuucagagccaccagaauu

SEQ ID NO: 19839 - RNA, 1765 nt, Artificial Sequence
  mRNA product Design i-3 comprising derived and/or modified sequence from HRSV(Memphis-37)__AIY60640.1__F-del_DSCav1_mut8 (opt3)
gggagaaagcuuaccauggagcugcccauccucaagaccaacgccauuacaacuauacuugcugcagugacgcugugcuucgccagcucccagaauaucaccgaagaguuuuaccaaucuacauguucagcggucaguaaaggcuauuugggggcuuuaagaacuggaugguacaccagcguuauuacaaucgaacuguccaacauuaaggagaucaaaugcaaugguaccgacgccaaggugaaacuaauaaagcaggaacucgauaaguauaaaaacgcaguaacugaccugcagcuucugaugcagucuacuccugccgcuggcucggggucagcaaucgccagcggaauugcuguguguaaggucuugcaccucgagggcgaggugaauaaaaucaagaacgcccugcugaguaccaauaaagcgguugugucccucucugguugcggggucagcguguuaacguucaagguacuggaucuuaagaacuacauugacaaacaauugcugccaauccuaaauaagcaguccuguucaauaccgaacauugaaacuguuaucgaguuucagcagaaaaauaacaggcuccuggaaauuacccgggaguucagugugaaugcaggagucacaacucccgugagcaccuauaugcuuacaaacucugagcuguugucccucaucaaugauaugccuaucaccaacgaccaaaagaaacugaugucaaacaaugugcagauuguccgccagcagagcuacaguauaaugugcaucauuaaggaagagguuuuagccuaugugguacaacugccacucuacggcgugaucgauacgcccuguuggaaacuucauacuucuccucugugcacaaccaacacuaaggaaggcuccaauauauguuugacacgaaccgaccgugggugguacugcgauaacgcuggaagcgucucguuuuucccacaggccgagacguguaaggugcagucuaauagaguuuucugcgacaccaugaacucccuaacacugcccucagaagugaaucucugcaacauugauaucuucaauccuaaauaugacuguaagaucaugacaaguaaaaccgaugucagcuccucugugauuacaagccugggugcaaucguaucaugcuacggcaagacuaaauguaccgcuaguaacaagugcagggggauuauaaagacauuuuccaauggaugugacuauguuagcaacaaaggcguggacaccgucucuguggguaauacucuuuacuaugucaacaagcaagaggggcagucacuguacgugaaaggagagccaaucauuaauuucuaugauccguugguuuuucccagugacgaauuugaugccagcaucucccaggugaacgagaagaucaaccagucucucgcguuuauucggaaaucggacgaacuguuacacaauguaaacgucggcaagagcacgacaaauauaaugaucaccacuauuaucauugugaucauaguuauccugcuacuccugauugccgugggccuuuucuuguacugcaaggcacgcugaggacuaguuauaagacugacuagcccgaugggccucccaacgggcccuccuccccuccuugcaccgagauuaauaaaaaaaaaaaaaaaaaaaaaaaaaaaaaaaaaaaaaaaaaaaaaaaaaaaaaaaaaaaaaaaaugcaucccccccccccccccccccccccccccccccaaaggcucuuuucagagccaccagaauu

SEQ ID NO: 19840 - RNA, 1765 nt, Artificial Sequence
  mRNA product Design i-3 comprising derived and/or modified sequence from HRSV(Memphis-37)__AIY60640.1__F-del_DSCav1_mut8 (opt4)
gggagaaagcuuaccauggagcugcccauccugaagaccaacgccaucaccaccauccuggccgccgugacccugugcuucgccagcagccagaacaucaccgaggaguucuaccagagcaccugcagcgccgugagcaagggcuaccugggcgcccugagaaccggcugguacaccagcgugaucaccaucgagcugagcaacaucaaggagaucaagugcaacggcaccgacgccaaggugaagcugaucaagcaggagcuggacaaguacaagaacgccgugaccgaccugcagcugcugaugcagagcacccccgccgccggcagcggcagcgccaucgccagcggcaucgccgugugcaaggugcugcaccuggagggcgaggugaacaagaucaagaacgcccugcugagcaccaacaaggccguggugagccugagcggcugcggcgugagcgugcugaccuucaaggugcuggaccugaagaacuacaucgacaagcagcugcugcccauccugaacaagcagagcugcagcauccccaacaucgagaccgugaucgaguuccagcagaagaacaacagacugcuggagaucaccagagaguucagcgugaacgccggcgugaccacccccgugagcaccuacaugcugaccaacagcgagcugcugagccugaucaacgacaugcccaucaccaacgaccagaagaagcugaugagcaacaacgugcagaucgugagacagcagagcuacagcaucaugugcaucaucaaggaggaggugcuggccuacguggugcagcugccccuguacggcgugaucgacacccccugcuggaagcugcacaccagcccccugugcaccaccaacaccaaggagggcagcaacaucugccugaccagaaccgacagaggcugguacugcgacaacgccggcagcgugagcuucuucccccaggccgagaccugcaaggugcagagcaacagaguguucugcgacaccaugaacagccugacccugcccagcgaggugaaccugugcaacaucgacaucuucaaccccaaguacgacugcaagaucaugaccagcaagaccgacgugagcagcagcgugaucaccagccugggcgccaucgugagcugcuacggcaagaccaagugcaccgccagcaacaagugcagaggcaucaucaagaccuucagcaacggcugcgacuacgugagcaacaagggcguggacaccgugagcgugggcaacacccuguacuacgugaacaagcaggagggccagagccuguacgugaagggcgagcccaucaucaacuucuacgacccccugguguuccccagcgacgaguucgacgccagcaucagccaggugaacgagaagaucaaccagagccuggccuucaucagaaagagcgacgagcugcugcacaacgugaacgugggcaagagcaccaccaacaucaugaucaccaccaucaucaucgugaucaucgugauccugcugcugcugaucgccgugggccuguuccuguacugcaaggccagaugaggacuaguuauaagacugacuagcccgaugggccucccaacgggcccuccuccccuccuugcaccgagauuaauaaaaaaaaaaaaaaaaaaaaaaaaaaaaaaaaaaaaaaaaaaaaaaaaaaaaaaaaaaaaaaaaugcaucccccccccccccccccccccccccccccccaaaggcucuuuucagagccaccagaauu

SEQ ID NO: 19841 - RNA, 1765 nt, Artificial Sequence
  mRNA product Design i-3 comprising derived and/or modified sequence from HRSV(Memphis-37)__AIY60640.1__F-del_DSCav1_mut8 (opt5)
gggagaaagcuuaccauggagcugcccauccucaagaccaacgccauuacaacgauccuggcugccgugacccuuugcuucgcgagcucccagaauauuacagaagaguuuuaccaaucuaccuguagcgcugucuccaaaggcuaucugggggcccucagaacaggaugguacaccucuguuaucacaauugaacugagcaacaucaaggagaucaaaugcaauggcaccgacgccaaggugaaacuuauuaagcaggaacuggauaaguauaaaaacgcugugacggaccuccagcugcugaugcaguccaccccugccgcugggucuggaagcgccaucgcguccggcauugccgucuguaaggugcuccaccuggagggggagguuaauaaaaucaagaacgcccuucugagcacaaauaaagcuguggucucucucuccggaugcggcgugagcguucugaccuucaaggugcuugaucugaagaacuacauugacaaacaacuccugccgauccugaauaagcagucuuguuccauucccaacaucgaaacagucaucgaguuucagcagaaaaauaaccggcuccuggaaauuacccgcgaguucagcgugaaugcuggcgugacgacaccugucucuaccuauaugcuuacaaacuccgagcugcucagccugaucaaugauaugcccauuaccaacgaccaaaagaaacuuauguccaacaauguucagaucgugagacagcagucuuacagcauuaugugcaucaucaaggaagaggugcuggccuaugucgugcaacucccucuguacgggguuauugauacccccuguuggaaacugcauacauccccucucugcacgaccaacacaaaggaaggaagcaauaucugucugacccggacagaccgcggcugguacugcgauaacgcggggucuguguccuuuuucccgcaggccgagaccuguaagguccagagcaauagaguguuuugcgacacgaugaacucucuuacacugcccagcgaaguuaaucucugcaacauugauaucuucaauccuaaauaugacuguaagauuaugaccuccaaaaccgaugugucuagcuccgucaucacaagccugggagcuaucgugucuugcuacggcaagaccaaauguacagccuccaacaagugccgggggauuaucaagacguuuagcaauggaugugacuaugucucuaacaaaggcguggacaccguuuccgugggcaauacacuuuacuaugucaacaagcaagaggggcagagccuguacgugaaaggagagcccauuaucaauuucuaugauccucucguuuuucccuccgacgaguucgaugcuucuauuagccaggugaacgaaaagaucaaccagucccuggccuuuauucgcaaaucugacgaacugcuccacaaugucaacgugggcaagagcaccacaaauaucaugaucaccacgauuaucauugugaucauuguuauccugcuucugcucaucgccgucgggcuguuccuguacugcaaggcuagaugaggacuaguuauaagacugacuagcccgaugggccucccaacgggcccuccuccccuccuugcaccgagauuaauaaaaaaaaaaaaaaaaaaaaaaaaaaaaaaaaaaaaaaaaaaaaaaaaaaaaaaaaaaaaaaaaugcaucccccccccccccccccccccccccccccccaaaggcucuuuucagagccaccagaauu

SEQ ID NO: 19842 - RNA, 1765 nt, Artificial Sequence
  mRNA product Design i-3 comprising derived and/or modified sequence from HRSV(Memphis-37)__AIY60640.1__F-del_DSCav1_mut8 (opt6)
gggagaaagcuuaccauggaacuacccauacuaaaaacaaacgcaauuacaacaauacuugccgcaguaaccuuaugcuuugccucaucccaaaacauaacagaagaauuuuaucaaucaacaugcuccgcaguaucaaaaggauaccuaggcgcucuaagaacaggaugguacacauccguaaucacaauagaacuauccaauauaaaagaaauaaaauguaauggaacagaugcaaaaguuaaauuaauaaaacaagaacuagacaaauacaaaaacgcaguuaccgaucuccaacuauuaaugcaaucaacaccagcugcaggaaguggaagcgccauagcaagcggaauagcagucugcaaaguauuacaucuugaaggcgaaguaaacaaaaucaaaaaugcccuccucucaacaaacaaagcuguaguaucccuaucaggaugcgguguaucuguucuuacauuuaaaguacucgaucuaaaaaacuacaucgauaaacaguuacuuccaauacucaacaaacaaucauguagcauaccaaacauagaaacaguaauagaauuucaacaaaaaaacaaucgacuacucgaaauaacuagagaauuuucuguaaacgcuggaguaaccacaccagugucuaccuauaugcuuacaaauagcgaacuccuaucacuaaucaaugacaugccaauaacaaaugaccagaaaaaacucaugucaaauaacguacaaauaguacgacaacaaagcuacuccauaaugugcauaaucaaagaagaaguauuagccuacguuguucaacuaccauuauauggaguuauagacacuccaugcuggaaauuacauacaagcccacucuguacaacaaacacaaaagaaggcucaaacauaugcuuaacaagaacagauagaggaugguacugcgauaacgcaggcucagucucauuuuuuccacaagccgaaaccugcaaaguacaaucaaauagaguuuuuugcgacacaaugaacucacucacucuaccaagugaaguaaaucucuguaauaucgacauauucaacccaaaauaugacugcaaaauaaugacaucuaaaaccgauguauccucaagcguaaucacaucauuaggagcuauaguuuccugcuacgguaaaacaaaaugcacagcauccaacaaaugucgcgguaucaucaaaacauucuccaacggaugugauuacguaucaaacaaaggugucgacaccguaagcguaggcaacacuuuauacuauguaaacaaacaagaaggacaaagucuauauguaaaaggagaaccaauaauaaacuucuaugacccccuaguauucccuuccgacgaauuugaugcaagcauuucacaaguuaacgaaaaaaucaaucaaucccuugcuuucauaagaaaaucagacgaauuacuacacaacguaaacguaggaaaaagcacaacaaauaucaugauuacaacaauaauaauuguaauaauaguaauacuccucuuacuuauagcagucggcuuauuccuuuacugcaaagcaagauaaggacuaguuauaagacugacuagcccgaugggccucccaacgggcccuccuccccuccuugcaccgagauuaauaaaaaaaaaaaaaaaaaaaaaaaaaaaaaaaaaaaaaaaaaaaaaaaaaaaaaaaaaaaaaaaaugcaucccccccccccccccccccccccccccccccaaaggcucuuuucagagccaccagaauu

SEQ ID NO: 19843 - RNA, 1765 nt, Artificial Sequence
  mRNA product Design i-3 comprising derived and/or modified sequence from HRSV(Memphis-37)__AIY60640.1__F-del_DSCav1_mut8 (opt11)
gggagaaagcuuaccauggaacuccccauccuaaaaaccaacgcaaucaccaccauccucgccgccguaacacucugcuuugcaagcucccaaaacaucaccgaagaauuuuaccaaucuaccugcagcgccguaucuaaaggauaccuaggagcccucagaaccgguugguacaccucugucaucacaauagaacucuccaacaucaaagaaaucaaaugcaacggcaccgacgccaaagucaaacucaucaaacaagaacucgacaaauauaaaaacgccguaaccgaccuccaacuccucaugcaauccacccccgccgccggcaguggcuccgcuaucgccuccggaaucgccguuugcaaaguccugcaccuagaaggcgaagucaacaaaaucaaaaacgcccugcucucaaccaacaaagcugucguaagccucuccggcugcggagucuccguccuuaccuucaaaguacucgaccuuaaaaacuacaucgacaaacaacuucuccccauacucaauaaacaauccugcuccauacccaacaucgaaacagucaucgaguuccaacagaaaaauaaccgccuccucgaaauaacccgcgaguucuccgucaacgcaggcgucaccaccccagucuccaccuacaugcugacaaacuccgaacuccuaucccucaucaacgacaugcccaucaccaacgaccaaaagaaacucaugagcaauaacguccaaaucguacgacaacaauccuacagcaucauguguaucaucaaagaagaaguacucgccuacgucguccaacucccacuauacggcgucaucgacacaccaugcuggaaacuucacaccuccccacucugcaccacaaacacaaaagaaggcuccaacaucugccuuacccgaaccgaccgcgggugguacugcgacaacgccggaucagucucguucuuuccccaagccgaaaccugcaaaguacaaucaaaucgcgucuucugcgacaccaugaacuccuuaacacuaccauccgaaguaaaccucugcaacauagacaucuucaacccaaaauacgacugcaaaaucaugaccuccaaaaccgacguauccuccuccguaaucaccagccucggcgcaauagucucaugcuacggcaaaaccaaaugcaccgccuccaacaaaugccgcggcaucauaaaaacuuucucuaacggaugcgacuacgucagcaacaaaggcgucgacaccguauccguagguaauacacuuuacuacgucaauaaacaagaaggccaaucccucuacgucaaaggagaacccaucauaaacuucuacgacccccucgucuuccccuccgacgaguucgacgccuccaucagccaggucaacgaaaagaucaaccaaucacucgccuucauccgcaaaagcgacgaacuccuccacaacguaaacgucggcaaauccacaaccaacauaaugaucaccacuaucaucaucgugauaaucgucauuuuacuucuccucaucgccguaggccucuuccuauacugcaaagcccgcuaaggacuaguuauaagacugacuagcccgaugggccucccaacgggcccuccuccccuccuugcaccgagauuaauaaaaaaaaaaaaaaaaaaaaaaaaaaaaaaaaaaaaaaaaaaaaaaaaaaaaaaaaaaaaaaaaugcaucccccccccccccccccccccccccccccccaaaggcucuuuucagagccaccagaauu

SEQ ID NO: 19844 - protein, 256 aa, Artificial Sequence; identical to SEQ ID NO: 9684
  derived and/or modified protein sequence (wt) from HRSV(Memphis-37)__AIY60638.1__M

SEQ ID NO: 19845 - RNA, 771 nt, Artificial Sequence
  derived and/or modified CDS sequence (wt) from HRSV(Memphis-37)__AIY60638.1__M
auggaaacauacgugaacaaacuucacgaaggcuccacauacacagcugcuguucaauacaauguccuagaaaaagacgaugacccugcaucacuuacaauaugggugcccauguuccaaucauccaugccagcagauuuacuuauaaaagaacuagcuaaugucaacauacuagugaaacaaauauccacacccaaaggaccuucauuaagagucaugauaaacucaagaagugcagugcuagcacaaaugcccagcaaauucacuauaugugccaauguguccuuggaugaaagaagcaagcuggcauaugauguaaccacacccugcgaaaucaaggcauguagucuaacaugccuaaaaucaaaaaauauguuaacuacaguuaaagaucucacuaugaaaacacucaacccaacacaugacaucauugcuuuaugugaauuugaaaauauaguaacaucaaaaaaagucauaauaccaacauacuuaagauccaucagugucagaaauaaagaucugaacacacuugaaaauauaacaaccaccgaauucaaaaaugccaucacaaaugcaaaaaucaucccuuacucaggauuacuguuagucaucacagugacugacaacaaaggagcauuuaaauacauaaagccacaaagucaauucauaguagaucuuggagcuuaccuagaaaaagaaaguauauauuauguuacaacaaauuggaagcacacagcuacacgauuugcaaucaaacccauggaagauuaa

SEQ ID NO: 19846 - RNA, 771 nt, Artificial Sequence; identical to SEQ ID NO: 9686
  derived and/or modified CDS sequence (opt1) from HRSV(Memphis-37)__AIY60638.1__M

SEQ ID NO: 19847 - RNA, 771 nt, Artificial Sequence; identical to SEQ ID NO: 9687
  derived and/or modified CDS sequence (opt2) from HRSV(Memphis-37)__AIY60638.1__M

SEQ ID NO: 19848 - RNA, 771 nt, Artificial Sequence; identical to SEQ ID NO: 9688
  derived and/or modified CDS sequence (opt3) from HRSV(Memphis-37)__AIY60638.1__M

SEQ ID NO: 19849 - RNA, 771 nt, Artificial Sequence; identical to SEQ ID NO: 9689
  derived and/or modified CDS sequence (opt4) from HRSV(Memphis-37)__AIY60638.1__M

SEQ ID NO: 19850 - RNA, 771 nt, Artificial Sequence; identical to SEQ ID NO: 9690
  derived and/or modified CDS sequence (opt5) from HRSV(Memphis-37)__AIY60638.1__M

SEQ ID NO: 19851 - RNA, 771 nt, Artificial Sequence
  derived and/or modified CDS sequence (opt6) from HRSV(Memphis-37)__AIY60638.1__M
auggaaacauauguaaacaaauuacacgaaggauccacuuacacagccgcaguacaauacaauguacuagaaaaagacgacgacccagcaucacuaacaauauggguacccauguuccaauccucaaugccagcagaccuccuaauaaaagaacuagcuaauguaaacauacucguaaaacaaauauccacaccaaaaggaccaucacuacgaguaaugauaaacuccagauccgcaguacuagcacaaaugccaucaaaauucacaauaugcgccaacguaucacuagacgaaagaucaaaauuagcauacgacguaacaacaccaugcgaaauaaaagcaugcucacucacaugcuuaaaaucaaaaaacaugcuaacaacaguaaaagaccuaacaaugaaaacacucaaccccacccacgacauaauugccuuaugcgaauuugaaaacauaguaacauccaaaaaaguaauaauaccaacauaccuaagauccauuucaguaagaaacaaagaccuaaacacacuagaaaacauaacaacaacagaauuuaaaaacgcaauaacaaacgcaaaaauaauaccauacucaggauuacuacuuguaauaacaguaacagacaacaaaggagcauucaaauacauaaaaccucaaucacaauuuauaguagaccuaggagcauacuuagaaaaagaaucaaucuauuacgucacuacaaacuggaaacacacagcaaccagauucgcaauaaaacccauggaagacuaa

SEQ ID NO: 19852 - RNA, 771 nt, Artificial Sequence
  derived and/or modified CDS sequence (opt11) from HRSV(Memphis-37)__AIY60638.1__M
auggaaaccuacgucaacaaacuccacgaaggauccaccuacaccgccgccguccaauacaacguccuugaaaaagacgacgaccccgccucccucaccaucuggguccccauguuccaauccucaaugcccgccgaccuccuaaucaaagaacucgccaacgucaacauccucgucaaacaaaucuccacccccaaaggccccucccuccgagucaugaucaacucccgcuccgccguccucgcacaaaugcccuccaaauucaccaucugcgccaacguaucccucgacgaacgcuccaaacucgcauacgacguuaccacucccugcgaaaucaaagccugcucacucaccugccucaaauccaaaaacaugcucaccaccgucaaagaccucaccaugaaaacccuaaaccccacccacgacaucaucgcccucugcgaauuugaaaacauagucaccuccaaaaaaguaaucauccccaccuaccuccgcuccaucuccguccgcaacaaagaccucaacacacucgaaaacaucacaaccaccgaauuuaaaaacgccaucaccaacgccaaaaucaucccauacuccggccuccuccuagucaucaccgucaccgacaacaaaggcgccuucaaguacaucaaaccacaaucccaauucaucgucgaccucggcgccuaccucgaaaaagaauccaucuacuacguaaccaccaacuggaaacacaccgccacccgcuucgccaucaaacccauggaagacuaa

SEQ ID NO: 19853 - RNA, 1047 nt, Artificial Sequence
  mRNA product Design a-1 comprising derived and/or modified sequence from HRSV(Memphis-37)__AIY60638.1__M (wt)
gggagagucccgcagucggcguccagcggcucugcuuguucgugugugugucguugcaggccuuauucaagcuuaccauggaaacauacgugaacaaacuucacgaaggcuccacauacacagcugcuguucaauacaauguccuagaaaaagacgaugacccugcaucacuuacaauaugggugcccauguuccaaucauccaugccagcagauuuacuuauaaaagaacuagcuaaugucaacauacuagugaaacaaauauccacacccaaaggaccuucauuaagagucaugauaaacucaagaagugcagugcuagcacaaaugcccagcaaauucacuauaugugccaauguguccuuggaugaaagaagcaagcuggcauaugauguaaccacacccugcgaaaucaaggcauguagucuaacaugccuaaaaucaaaaaauauguuaacuacaguuaaagaucucacuaugaaaacacucaacccaacacaugacaucauugcuuuaugugaauuugaaaauauaguaacaucaaaaaaagucauaauaccaacauacuuaagauccaucagugucagaaauaaagaucugaacacacuugaaaauauaacaaccaccgaauucaaaaaugccaucacaaaugcaaaaaucaucccuuacucaggauuacuguuagucaucacagugacugacaacaaaggagcauuuaaauacauaaagccacaaagucaauucauaguagaucuuggagcuuaccuagaaaaagaaaguauauauuauguuacaacaaauuggaagcacacagcuacacgauuugcaaucaaacccauggaagauuaaggacuagucccuguucccagagcccacuuuuuuuucuuuuuuugaaauaaaauagccugucuuucagaucuaaaaaaaaaaaaaaaaaaaaaaaaaaaaaaaaaaaaaaaaaaaaaaaaaaaaaaaaaaaaaaaaugcaucccccccccccccccccccccccccccccccaaaggcucuuuucagagccaccagaauu

SEQ ID NO: 19854 - RNA, 1047 nt, Artificial Sequence; identical to SEQ ID NO: 9694
  mRNA product Design a-1 comprising derived and/or modified sequence from HRSV(Memphis-37)__AIY60638.1__M (opt1)

SEQ ID NO: 19855 - RNA, 1047 nt, Artificial Sequence; identical to SEQ ID NO: 9695
  mRNA product Design a-1 comprising derived and/or modified sequence from HRSV(Memphis-37)__AIY60638.1__M (opt2)

SEQ ID NO: 19856 - RNA, 1047 nt, Artificial Sequence; identical to SEQ ID NO: 9696
  mRNA product Design a-1 comprising derived and/or modified sequence from HRSV(Memphis-37)__AIY60638.1__M (opt3)

SEQ ID NO: 19857 - RNA, 1047 nt, Artificial Sequence; identical to SEQ ID NO: 9697
  mRNA product Design a-1 comprising derived and/or modified sequence from HRSV(Memphis-37)__AIY60638.1__M (opt4)

SEQ ID NO: 19858 - RNA, 1047 nt, Artificial Sequence; identical to SEQ ID NO: 9698
  mRNA product Design a-1 comprising derived and/or modified sequence from HRSV(Memphis-37)__AIY60638.1__M (opt5)

SEQ ID NO: 19859 - RNA, 1047 nt, Artificial Sequence
  mRNA product Design a-1 comprising derived and/or modified sequence from HRSV(Memphis-37)__AIY60638.1__M (opt6)
gggagagucccgcagucggcguccagcggcucugcuuguucgugugugugucguugcaggccuuauucaagcuuaccauggaaacauauguaaacaaauuacacgaaggauccacuuacacagccgcaguacaauacaauguacuagaaaaagacgacgacccagcaucacuaacaauauggguacccauguuccaauccucaaugccagcagaccuccuaauaaaagaacuagcuaauguaaacauacucguaaaacaaauauccacaccaaaaggaccaucacuacgaguaaugauaaacuccagauccgcaguacuagcacaaaugccaucaaaauucacaauaugcgccaacguaucacuagacgaaagaucaaaauuagcauacgacguaacaacaccaugcgaaauaaaagcaugcucacucacaugcuuaaaaucaaaaaacaugcuaacaacaguaaaagaccuaacaaugaaaacacucaaccccacccacgacauaauugccuuaugcgaauuugaaaacauaguaacauccaaaaaaguaauaauaccaacauaccuaagauccauuucaguaagaaacaaagaccuaaacacacuagaaaacauaacaacaacagaauuuaaaaacgcaauaacaaacgcaaaaauaauaccauacucaggauuacuacuuguaauaacaguaacagacaacaaaggagcauucaaauacauaaaaccucaaucacaauuuauaguagaccuaggagcauacuuagaaaaagaaucaaucuauuacgucacuacaaacuggaaacacacagcaaccagauucgcaauaaaacccauggaagacuaaggacuagucccuguucccagagcccacuuuuuuuucuuuuuuugaaauaaaauagccugucuuucagaucuaaaaaaaaaaaaaaaaaaaaaaaaaaaaaaaaaaaaaaaaaaaaaaaaaaaaaaaaaaaaaaaaugcaucccccccccccccccccccccccccccccccaaaggcucuuuucagagccaccagaauu

SEQ ID NO: 19860 - RNA, 1047 nt, Artificial Sequence
  mRNA product Design a-1 comprising derived and/or modified sequence from HRSV(Memphis-37)__AIY60638.1__M (opt11)
gggagagucccgcagucggcguccagcggcucugcuuguucgugugugugucguugcaggccuuauucaagcuuaccauggaaaccuacgucaacaaacuccacgaaggauccaccuacaccgccgccguccaauacaacguccuugaaaaagacgacgaccccgccucccucaccaucuggguccccauguuccaauccucaaugcccgccgaccuccuaaucaaagaacucgccaacgucaacauccucgucaaacaaaucuccacccccaaaggccccucccuccgagucaugaucaacucccgcuccgccguccucgcacaaaugcccuccaaauucaccaucugcgccaacguaucccucgacgaacgcuccaaacucgcauacgacguuaccacucccugcgaaaucaaagccugcucacucaccugccucaaauccaaaaacaugcucaccaccgucaaagaccucaccaugaaaacccuaaaccccacccacgacaucaucgcccucugcgaauuugaaaacauagucaccuccaaaaaaguaaucauccccaccuaccuccgcuccaucuccguccgcaacaaagaccucaacacacucgaaaacaucacaaccaccgaauuuaaaaacgccaucaccaacgccaaaaucaucccauacuccggccuccuccuagucaucaccgucaccgacaacaaaggcgccuucaaguacaucaaaccacaaucccaauucaucgucgaccucggcgccuaccucgaaaaagaauccaucuacuacguaaccaccaacuggaaacacaccgccacccgcuucgccaucaaacccauggaagacuaaggacuagucccuguucccagagcccacuuuuuuuucuuuuuuugaaauaaaauagccugucuuucagaucuaaaaaaaaaaaaaaaaaaaaaaaaaaaaaaaaaaaaaaaaaaaaaaaaaaaaaaaaaaaaaaaaugcaucccccccccccccccccccccccccccccccaaaggcucuuuucagagccaccagaauu

SEQ ID NO: 19861 - RNA, 1066 nt, Artificial Sequence
  mRNA product Design a-2 comprising derived and/or modified sequence from HRSV(Memphis-37)__AIY60638.1__M (wt)
gggagaguccgcucagccagguugcagaagcggcuuagcguguguccuaaucuucucucugcguguagguaggccugugccgcaaacaagcuuaccauggaaacauacgugaacaaacuucacgaaggcuccacauacacagcugcuguucaauacaauguccuagaaaaagacgaugacccugcaucacuuacaauaugggugcccauguuccaaucauccaugccagcagauuuacuuauaaaagaacuagcuaaugucaacauacuagugaaacaaauauccacacccaaaggaccuucauuaagagucaugauaaacucaagaagugcagugcuagcacaaaugcccagcaaauucacuauaugugccaauguguccuuggaugaaagaagcaagcuggcauaugauguaaccacacccugcgaaaucaaggcauguagucuaacaugccuaaaaucaaaaaauauguuaacuacaguuaaagaucucacuaugaaaacacucaacccaacacaugacaucauugcuuuaugugaauuugaaaauauaguaacaucaaaaaaagucauaauaccaacauacuuaagauccaucagugucagaaauaaagaucugaacacacuugaaaauauaacaaccaccgaauucaaaaaugccaucacaaaugcaaaaaucaucccuuacucaggauuacuguuagucaucacagugacugacaacaaaggagcauuuaaauacauaaagccacaaagucaauucauaguagaucuuggagcuuaccuagaaaaagaaaguauauauuauguuacaacaaauuggaagcacacagcuacacgauuugcaaucaaacccauggaagauuaaggacuagucccuguucccagagcccacuuuuuuuucuuuuuuugaaauaaaauagccugucuuucagaucuaaaaaaaaaaaaaaaaaaaaaaaaaaaaaaaaaaaaaaaaaaaaaaaaaaaaaaaaaaaaaaaaugcaucccccccccccccccccccccccccccccccaaaggcucuuuucagagccaccagaauu

SEQ ID NO: 19862 - RNA, 1066 nt, Artificial Sequence; identical to SEQ ID NO: 9702
  mRNA product Design a-2 comprising derived and/or modified sequence from HRSV(Memphis-37)__AIY60638.1__M (opt1)

SEQ ID NO: 19863 - RNA, 1066 nt, Artificial Sequence; identical to SEQ ID NO: 9703
  mRNA product Design a-2 comprising derived and/or modified sequence from HRSV(Memphis-37)__AIY60638.1__M (opt2)

SEQ ID NO: 19864 - RNA, 1066 nt, Artificial Sequence; identical to SEQ ID NO: 9704
  mRNA product Design a-2 comprising derived and/or modified sequence from HRSV(Memphis-37)__AIY60638.1__M (opt3)

SEQ ID NO: 19865 - RNA, 1066 nt, Artificial Sequence; identical to SEQ ID NO: 9705
  mRNA product Design a-2 comprising derived and/or modified sequence from HRSV(Memphis-37)__AIY60638.1__M (opt4)

SEQ ID NO: 19866 - RNA, 1066 nt, Artificial Sequence; identical to SEQ ID NO: 9706
  mRNA product Design a-2 comprising derived and/or modified sequence from HRSV(Memphis-37)__AIY60638.1__M (opt5)

SEQ ID NO: 19867 - RNA, 1066 nt, Artificial Sequence
  mRNA product Design a-2 comprising derived and/or modified sequence from HRSV(Memphis-37)__AIY60638.1__M (opt6)
gggagaguccgcucagccagguugcagaagcggcuuagcguguguccuaaucuucucucugcguguagguaggccugugccgcaaacaagcuuaccauggaaacauauguaaacaaauuacacgaaggauccacuuacacagccgcaguacaauacaauguacuagaaaaagacgacgacccagcaucacuaacaauauggguacccauguuccaauccucaaugccagcagaccuccuaauaaaagaacuagcuaauguaaacauacucguaaaacaaauauccacaccaaaaggaccaucacuacgaguaaugauaaacuccagauccgcaguacuagcacaaaugccaucaaaauucacaauaugcgccaacguaucacuagacgaaagaucaaaauuagcauacgacguaacaacaccaugcgaaauaaaagcaugcucacucacaugcuuaaaaucaaaaaacaugcuaacaacaguaaaagaccuaacaaugaaaacacucaaccccacccacgacauaauugccuuaugcgaauuugaaaacauaguaacauccaaaaaaguaauaauaccaacauaccuaagauccauuucaguaagaaacaaagaccuaaacacacuagaaaacauaacaacaacagaauuuaaaaacgcaauaacaaacgcaaaaauaauaccauacucaggauuacuacuuguaauaacaguaacagacaacaaaggagcauucaaauacauaaaaccucaaucacaauuuauaguagaccuaggagcauacuuagaaaaagaaucaaucuauuacgucacuacaaacuggaaacacacagcaaccagauucgcaauaaaacccauggaagacuaaggacuagucccuguucccagagcccacuuuuuuuucuuuuuuugaaauaaaauagccugucuuucagaucuaaaaaaaaaaaaaaaaaaaaaaaaaaaaaaaaaaaaaaaaaaaaaaaaaaaaaaaaaaaaaaaaugcaucccccccccccccccccccccccccccccccaaaggcucuuuucagagccaccagaauu

SEQ ID NO: 19868 - RNA, 1066 nt, Artificial Sequence
  mRNA product Design a-2 comprising derived and/or modified sequence from HRSV(Memphis-37)__AIY60638.1__M (opt11)
gggagaguccgcucagccagguugcagaagcggcuuagcguguguccuaaucuucucucugcguguagguaggccugugccgcaaacaagcuuaccauggaaaccuacgucaacaaacuccacgaaggauccaccuacaccgccgccguccaauacaacguccuugaaaaagacgacgaccccgccucccucaccaucuggguccccauguuccaauccucaaugcccgccgaccuccuaaucaaagaacucgccaacgucaacauccucgucaaacaaaucuccacccccaaaggccccucccuccgagucaugaucaacucccgcuccgccguccucgcacaaaugcccuccaaauucaccaucugcgccaacguaucccucgacgaacgcuccaaacucgcauacgacguuaccacucccugcgaaaucaaagccugcucacucaccugccucaaauccaaaaacaugcucaccaccgucaaagaccucaccaugaaaacccuaaaccccacccacgacaucaucgcccucugcgaauuugaaaacauagucaccuccaaaaaaguaaucauccccaccuaccuccgcuccaucuccguccgcaacaaagaccucaacacacucgaaaacaucacaaccaccgaauuuaaaaacgccaucaccaacgccaaaaucaucccauacuccggccuccuccuagucaucaccgucaccgacaacaaaggcgccuucaaguacaucaaaccacaaucccaauucaucgucgaccucggcgccuaccucgaaaaagaauccaucuacuacguaaccaccaacuggaaacacaccgccacccgcuucgccaucaaacccauggaagacuaaggacuagucccuguucccagagcccacuuuuuuuucuuuuuuugaaauaaaauagccugucuuucagaucuaaaaaaaaaaaaaaaaaaaaaaaaaaaaaaaaaaaaaaaaaaaaaaaaaaaaaaaaaaaaaaaaugcaucccccccccccccccccccccccccccccccaaaggcucuuuucagagccaccagaauu

SEQ ID NO: 19869 - RNA, 1144 nt, Artificial Sequence
  mRNA product Design a-3 comprising derived and/or modified sequence from HRSV(Memphis-37)__AIY60638.1__M (wt)
gggagagggcgcuuggcuugcaaggacccugagcugcggcauugaagcacacccaacccaacucgacugaagucagccucacugaaccggaucugagaaucuucucucucugggcuugccagggcucuccgaaccuagcuagcauccucuucaauuccaacuagaaagcuuaccauggaaacauacgugaacaaacuucacgaaggcuccacauacacagcugcuguucaauacaauguccuagaaaaagacgaugacccugcaucacuuacaauaugggugcccauguuccaaucauccaugccagcagauuuacuuauaaaagaacuagcuaaugucaacauacuagugaaacaaauauccacacccaaaggaccuucauuaagagucaugauaaacucaagaagugcagugcuagcacaaaugcccagcaaauucacuauaugugccaauguguccuuggaugaaagaagcaagcuggcauaugauguaaccacacccugcgaaaucaaggcauguagucuaacaugccuaaaaucaaaaaauauguuaacuacaguuaaagaucucacuaugaaaacacucaacccaacacaugacaucauugcuuuaugugaauuugaaaauauaguaacaucaaaaaaagucauaauaccaacauacuuaagauccaucagugucagaaauaaagaucugaacacacuugaaaauauaacaaccaccgaauucaaaaaugccaucacaaaugcaaaaaucaucccuuacucaggauuacuguuagucaucacagugacugacaacaaaggagcauuuaaauacauaaagccacaaagucaauucauaguagaucuuggagcuuaccuagaaaaagaaaguauauauuauguuacaacaaauuggaagcacacagcuacacgauuugcaaucaaacccauggaagauuaaggacuagucccuguucccagagcccacuuuuuuuucuuuuuuugaaauaaaauagccugucuuucagaucuaaaaaaaaaaaaaaaaaaaaaaaaaaaaaaaaaaaaaaaaaaaaaaaaaaaaaaaaaaaaaaaaugcaucccccccccccccccccccccccccccccccaaaggcucuuuucagagccaccagaauu

SEQ ID NO: 19870 - RNA, 1144 nt, Artificial Sequence; identical to SEQ ID NO: 9710
  mRNA product Design a-3 comprising derived and/or modified sequence from HRSV(Memphis-37)__AIY60638.1__M (opt1)

SEQ ID NO: 19871 - RNA, 1144 nt, Artificial Sequence; identical to SEQ ID NO: 9711
  mRNA product Design a-3 comprising derived and/or modified sequence from HRSV(Memphis-37)__AIY60638.1__M (opt2)

SEQ ID NO: 19872 - RNA, 1144 nt, Artificial Sequence; identical to SEQ ID NO: 9712
  mRNA product Design a-3 comprising derived and/or modified sequence from HRSV(Memphis-37)__AIY60638.1__M (opt3)

SEQ ID NO: 19873 - RNA, 1144 nt, Artificial Sequence; identical to SEQ ID NO: 9713
  mRNA product Design a-3 comprising derived and/or modified sequence from HRSV(Memphis-37)__AIY60638.1__M (opt4)

SEQ ID NO: 19874 - RNA, 1144 nt, Artificial Sequence; identical to SEQ ID NO: 9714
  mRNA product Design a-3 comprising derived and/or modified sequence from HRSV(Memphis-37)__AIY60638.1__M (opt5)

SEQ ID NO: 19875 - RNA, 1144 nt, Artificial Sequence
  mRNA product Design a-3 comprising derived and/or modified sequence from HRSV(Memphis-37)__AIY60638.1__M (opt6)
gggagagggcgcuuggcuugcaaggacccugagcugcggcauugaagcacacccaacccaacucgacugaagucagccucacugaaccggaucugagaaucuucucucucugggcuugccagggcucuccgaaccuagcuagcauccucuucaauuccaacuagaaagcuuaccauggaaacauauguaaacaaauuacacgaaggauccacuuacacagccgcaguacaauacaauguacuagaaaaagacgacgacccagcaucacuaacaauauggguacccauguuccaauccucaaugccagcagaccuccuaauaaaagaacuagcuaauguaaacauacucguaaaacaaauauccacaccaaaaggaccaucacuacgaguaaugauaaacuccagauccgcaguacuagcacaaaugccaucaaaauucacaauaugcgccaacguaucacuagacgaaagaucaaaauuagcauacgacguaacaacaccaugcgaaauaaaagcaugcucacucacaugcuuaaaaucaaaaaacaugcuaacaacaguaaaagaccuaacaaugaaaacacucaaccccacccacgacauaauugccuuaugcgaauuugaaaacauaguaacauccaaaaaaguaauaauaccaacauaccuaagauccauuucaguaagaaacaaagaccuaaacacacuagaaaacauaacaacaacagaauuuaaaaacgcaauaacaaacgcaaaaauaauaccauacucaggauuacuacuuguaauaacaguaacagacaacaaaggagcauucaaauacauaaaaccucaaucacaauuuauaguagaccuaggagcauacuuagaaaaagaaucaaucuauuacgucacuacaaacuggaaacacacagcaaccagauucgcaauaaaacccauggaagacuaaggacuagucccuguucccagagcccacuuuuuuuucuuuuuuugaaauaaaauagccugucuuucagaucuaaaaaaaaaaaaaaaaaaaaaaaaaaaaaaaaaaaaaaaaaaaaaaaaaaaaaaaaaaaaaaaaugcaucccccccccccccccccccccccccccccccaaaggcucuuuucagagccaccagaauu

SEQ ID NO: 19876 - RNA, 1144 nt, Artificial Sequence
  mRNA product Design a-3 comprising derived and/or modified sequence from HRSV(Memphis-37)__AIY60638.1__M (opt11)
gggagagggcgcuuggcuugcaaggacccugagcugcggcauugaagcacacccaacccaacucgacugaagucagccucacugaaccggaucugagaaucuucucucucugggcuugccagggcucuccgaaccuagcuagcauccucuucaauuccaacuagaaagcuuaccauggaaaccuacgucaacaaacuccacgaaggauccaccuacaccgccgccguccaauacaacguccuugaaaaagacgacgaccccgccucccucaccaucuggguccccauguuccaauccucaaugcccgccgaccuccuaaucaaagaacucgccaacgucaacauccucgucaaacaaaucuccacccccaaaggccccucccuccgagucaugaucaacucccgcuccgccguccucgcacaaaugcccuccaaauucaccaucugcgccaacguaucccucgacgaacgcuccaaacucgcauacgacguuaccacucccugcgaaaucaaagccugcucacucaccugccucaaauccaaaaacaugcucaccaccgucaaagaccucaccaugaaaacccuaaaccccacccacgacaucaucgcccucugcgaauuugaaaacauagucaccuccaaaaaaguaaucauccccaccuaccuccgcuccaucuccguccgcaacaaagaccucaacacacucgaaaacaucacaaccaccgaauuuaaaaacgccaucaccaacgccaaaaucaucccauacuccggccuccuccuagucaucaccgucaccgacaacaaaggcgccuucaaguacaucaaaccacaaucccaauucaucgucgaccucggcgccuaccucgaaaaagaauccaucuacuacguaaccaccaacuggaaacacaccgccacccgcuucgccaucaaacccauggaagacuaaggacuagucccuguucccagagcccacuuuuuuuucuuuuuuugaaauaaaauagccugucuuucagaucuaaaaaaaaaaaaaaaaaaaaaaaaaaaaaaaaaaaaaaaaaaaaaaaaaaaaaaaaaaaaaaaaugcaucccccccccccccccccccccccccccccccaaaggcucuuuucagagccaccagaauu

SEQ ID NO: 19877 - RNA, 1093 nt, Artificial Sequence
  mRNA product Design a-4 comprising derived and/or modified sequence from HRSV(Memphis-37)__AIY60638.1__M (wt)
gggagacuccugucgggcggaaguaggaggaguagaguuuaaaaacaguacucuuuuuccgguucgggacguaguugaagcaacgacaagccggauaaccgcucuugagacaggaagcuuaccauggaaacauacgugaacaaacuucacgaaggcuccacauacacagcugcuguucaauacaauguccuagaaaaagacgaugacccugcaucacuuacaauaugggugcccauguuccaaucauccaugccagcagauuuacuuauaaaagaacuagcuaaugucaacauacuagugaaacaaauauccacacccaaaggaccuucauuaagagucaugauaaacucaagaagugcagugcuagcacaaaugcccagcaaauucacuauaugugccaauguguccuuggaugaaagaagcaagcuggcauaugauguaaccacacccugcgaaaucaaggcauguagucuaacaugccuaaaaucaaaaaauauguuaacuacaguuaaagaucucacuaugaaaacacucaacccaacacaugacaucauugcuuuaugugaauuugaaaauauaguaacaucaaaaaaagucauaauaccaacauacuuaagauccaucagugucagaaauaaagaucugaacacacuugaaaauauaacaaccaccgaauucaaaaaugccaucacaaaugcaaaaaucaucccuuacucaggauuacuguuagucaucacagugacugacaacaaaggagcauuuaaauacauaaagccacaaagucaauucauaguagaucuuggagcuuaccuagaaaaagaaaguauauauuauguuacaacaaauuggaagcacacagcuacacgauuugcaaucaaacccauggaagauuaaggacuagucccuguucccagagcccacuuuuuuuucuuuuuuugaaauaaaauagccugucuuucagaucuaaaaaaaaaaaaaaaaaaaaaaaaaaaaaaaaaaaaaaaaaaaaaaaaaaaaaaaaaaaaaaaaugcaucccccccccccccccccccccccccccccccaaaggcucuuuucagagccaccagaauu

SEQ ID NO: 19878 - RNA, 1093 nt, Artificial Sequence; identical to SEQ ID NO: 9718
  mRNA product Design a-4 comprising derived and/or modified sequence from HRSV(Memphis-37)__AIY60638.1__M (opt1)

SEQ ID NO: 19879 - RNA, 1093 nt, Artificial Sequence; identical to SEQ ID NO: 9719
  mRNA product Design a-4 comprising derived and/or modified sequence from HRSV(Memphis-37)__AIY60638.1__M (opt2)

SEQ ID NO: 19880 - RNA, 1093 nt, Artificial Sequence; identical to SEQ ID NO: 9720
  mRNA product Design a-4 comprising derived and/or modified sequence from HRSV(Memphis-37)__AIY60638.1__M (opt3)

SEQ ID NO: 19881 - RNA, 1093 nt, Artificial Sequence; identical to SEQ ID NO: 9721
  mRNA product Design a-4 comprising derived and/or modified sequence from HRSV(Memphis-37)__AIY60638.1__M (opt4)

SEQ ID NO: 19882 - RNA, 1093 nt, Artificial Sequence; identical to SEQ ID NO: 9722
  mRNA product Design a-4 comprising derived and/or modified sequence from HRSV(Memphis-37)__AIY60638.1__M (opt5)

SEQ ID NO: 19883 - RNA, 1093 nt, Artificial Sequence
  mRNA product Design a-4 comprising derived and/or modified sequence from HRSV(Memphis-37)__AIY60638.1__M (opt6)
gggagacuccugucgggcggaaguaggaggaguagaguuuaaaaacaguacucuuuuuccgguucgggacguaguugaagcaacgacaagccggauaaccgcucuugagacaggaagcuuaccauggaaacauauguaaacaaauuacacgaaggauccacuuacacagccgcaguacaauacaauguacuagaaaaagacgacgacccagcaucacuaacaauauggguacccauguuccaauccucaaugccagcagaccuccuaauaaaagaacuagcuaauguaaacauacucguaaaacaaauauccacaccaaaaggaccaucacuacgaguaaugauaaacuccagauccgcaguacuagcacaaaugccaucaaaauucacaauaugcgccaacguaucacuagacgaaagaucaaaauuagcauacgacguaacaacaccaugcgaaauaaaagcaugcucacucacaugcuuaaaaucaaaaaacaugcuaacaacaguaaaagaccuaacaaugaaaacacucaaccccacccacgacauaauugccuuaugcgaauuugaaaacauaguaacauccaaaaaaguaauaauaccaacauaccuaagauccauuucaguaagaaacaaagaccuaaacacacuagaaaacauaacaacaacagaauuuaaaaacgcaauaacaaacgcaaaaauaauaccauacucaggauuacuacuuguaauaacaguaacagacaacaaaggagcauucaaauacauaaaaccucaaucacaauuuauaguagaccuaggagcauacuuagaaaaagaaucaaucuauuacgucacuacaaacuggaaacacacagcaaccagauucgcaauaaaacccauggaagacuaaggacuagucccuguucccagagcccacuuuuuuuucuuuuuuugaaauaaaauagccugucuuucagaucuaaaaaaaaaaaaaaaaaaaaaaaaaaaaaaaaaaaaaaaaaaaaaaaaaaaaaaaaaaaaaaaaugcaucccccccccccccccccccccccccccccccaaaggcucuuuucagagccaccagaauu

SEQ ID NO: 19884 - RNA, 1093 nt, Artificial Sequence
  mRNA product Design a-4 comprising derived and/or modified sequence from HRSV(Memphis-37)__AIY60638.1__M (opt11)
gggagacuccugucgggcggaaguaggaggaguagaguuuaaaaacaguacucuuuuuccgguucgggacguaguugaagcaacgacaagccggauaaccgcucuugagacaggaagcuuaccauggaaaccuacgucaacaaacuccacgaaggauccaccuacaccgccgccguccaauacaacguccuugaaaaagacgacgaccccgccucccucaccaucuggguccccauguuccaauccucaaugcccgccgaccuccuaaucaaagaacucgccaacgucaacauccucgucaaacaaaucuccacccccaaaggccccucccuccgagucaugaucaacucccgcuccgccguccucgcacaaaugcccuccaaauucaccaucugcgccaacguaucccucgacgaacgcuccaaacucgcauacgacguuaccacucccugcgaaaucaaagccugcucacucaccugccucaaauccaaaaacaugcucaccaccgucaaagaccucaccaugaaaacccuaaaccccacccacgacaucaucgcccucugcgaauuugaaaacauagucaccuccaaaaaaguaaucauccccaccuaccuccgcuccaucuccguccgcaacaaagaccucaacacacucgaaaacaucacaaccaccgaauuuaaaaacgccaucaccaacgccaaaaucaucccauacuccggccuccuccuagucaucaccgucaccgacaacaaaggcgccuucaaguacaucaaaccacaaucccaauucaucgucgaccucggcgccuaccucgaaaaagaauccaucuacuacguaaccaccaacuggaaacacaccgccacccgcuucgccaucaaacccauggaagacuaaggacuagucccuguucccagagcccacuuuuuuuucuuuuuuugaaauaaaauagccugucuuucagaucuaaaaaaaaaaaaaaaaaaaaaaaaaaaaaaaaaaaaaaaaaaaaaaaaaaaaaaaaaaaaaaaaugcaucccccccccccccccccccccccccccccccaaaggcucuuuucagagccaccagaauu

SEQ ID NO: 19885 - RNA, 1039 nt, Artificial Sequence
  mRNA product Design a-5 comprising derived and/or modified sequence from HRSV(Memphis-37)__AIY60638.1__M (wt)
gggagacuuucccauucuguagcagaauuugguguugccuguggucuuggucccgcggagaagcuuaccauggaaacauacgugaacaaacuucacgaaggcuccacauacacagcugcuguucaauacaauguccuagaaaaagacgaugacccugcaucacuuacaauaugggugcccauguuccaaucauccaugccagcagauuuacuuauaaaagaacuagcuaaugucaacauacuagugaaacaaauauccacacccaaaggaccuucauuaagagucaugauaaacucaagaagugcagugcuagcacaaaugcccagcaaauucacuauaugugccaauguguccuuggaugaaagaagcaagcuggcauaugauguaaccacacccugcgaaaucaaggcauguagucuaacaugccuaaaaucaaaaaauauguuaacuacaguuaaagaucucacuaugaaaacacucaacccaacacaugacaucauugcuuuaugugaauuugaaaauauaguaacaucaaaaaaagucauaauaccaacauacuuaagauccaucagugucagaaauaaagaucugaacacacuugaaaauauaacaaccaccgaauucaaaaaugccaucacaaaugcaaaaaucaucccuuacucaggauuacuguuagucaucacagugacugacaacaaaggagcauuuaaauacauaaagccacaaagucaauucauaguagaucuuggagcuuaccuagaaaaagaaaguauauauuauguuacaacaaauuggaagcacacagcuacacgauuugcaaucaaacccauggaagauuaaggacuagucccuguucccagagcccacuuuuuuuucuuuuuuugaaauaaaauagccugucuuucagaucuaaaaaaaaaaaaaaaaaaaaaaaaaaaaaaaaaaaaaaaaaaaaaaaaaaaaaaaaaaaaaaaaugcaucccccccccccccccccccccccccccccccaaaggcucuuuucagagccaccagaauu

SEQ ID NO: 19886 - RNA, 1039 nt, Artificial Sequence; identical to SEQ ID NO: 9726
  mRNA product Design a-5 comprising derived and/or modified sequence from HRSV(Memphis-37)__AIY60638.1__M (opt1)

SEQ ID NO: 19887 - RNA, 1039 nt, Artificial Sequence; identical to SEQ ID NO: 9727
  mRNA product Design a-5 comprising derived and/or modified sequence from HRSV(Memphis-37)__AIY60638.1__M (opt2)

SEQ ID NO: 19888 - RNA, 1039 nt, Artificial Sequence; identical to SEQ ID NO: 9728
  mRNA product Design a-5 comprising derived and/or modified sequence from HRSV(Memphis-37)__AIY60638.1__M (opt3)

SEQ ID NO: 19889 - RNA, 1039 nt, Artificial Sequence; identical to SEQ ID NO: 9729
  mRNA product Design a-5 comprising derived and/or modified sequence from HRSV(Memphis-37)__AIY60638.1__M (opt4)

SEQ ID NO: 19890 - RNA, 1039 nt, Artificial Sequence; identical to SEQ ID NO: 9730
  mRNA product Design a-5 comprising derived and/or modified sequence from HRSV(Memphis-37)__AIY60638.1__M (opt5)

SEQ ID NO: 19891 - RNA, 1039 nt, Artificial Sequence
  mRNA product Design a-5 comprising derived and/or modified sequence from HRSV(Memphis-37)__AIY60638.1__M (opt6)
gggagacuuucccauucuguagcagaauuugguguugccuguggucuuggucccgcggagaagcuuaccauggaaacauauguaaacaaauuacacgaaggauccacuuacacagccgcaguacaauacaauguacuagaaaaagacgacgacccagcaucacuaacaauauggguacccauguuccaauccucaaugccagcagaccuccuaauaaaagaacuagcuaauguaaacauacucguaaaacaaauauccacaccaaaaggaccaucacuacgaguaaugauaaacuccagauccgcaguacuagcacaaaugccaucaaaauucacaauaugcgccaacguaucacuagacgaaagaucaaaauuagcauacgacguaacaacaccaugcgaaauaaaagcaugcucacucacaugcuuaaaaucaaaaaacaugcuaacaacaguaaaagaccuaacaaugaaaacacucaaccccacccacgacauaauugccuuaugcgaauuugaaaacauaguaacauccaaaaaaguaauaauaccaacauaccuaagauccauuucaguaagaaacaaagaccuaaacacacuagaaaacauaacaacaacagaauuuaaaaacgcaauaacaaacgcaaaaauaauaccauacucaggauuacuacuuguaauaacaguaacagacaacaaaggagcauucaaauacauaaaaccucaaucacaauuuauaguagaccuaggagcauacuuagaaaaagaaucaaucuauuacgucacuacaaacuggaaacacacagcaaccagauucgcaauaaaacccauggaagacuaaggacuagucccuguucccagagcccacuuuuuuuucuuuuuuugaaauaaaauagccugucuuucagaucuaaaaaaaaaaaaaaaaaaaaaaaaaaaaaaaaaaaaaaaaaaaaaaaaaaaaaaaaaaaaaaaaugcaucccccccccccccccccccccccccccccccaaaggcucuuuucagagccaccagaauu

SEQ ID NO: 19892 - RNA, 1039 nt, Artificial Sequence
  mRNA product Design a-5 comprising derived and/or modified sequence from HRSV(Memphis-37)__AIY60638.1__M (opt11)
gggagacuuucccauucuguagcagaauuugguguugccuguggucuuggucccgcggagaagcuuaccauggaaaccuacgucaacaaacuccacgaaggauccaccuacaccgccgccguccaauacaacguccuugaaaaagacgacgaccccgccucccucaccaucuggguccccauguuccaauccucaaugcccgccgaccuccuaaucaaagaacucgccaacgucaacauccucgucaaacaaaucuccacccccaaaggccccucccuccgagucaugaucaacucccgcuccgccguccucgcacaaaugcccuccaaauucaccaucugcgccaacguaucccucgacgaacgcuccaaacucgcauacgacguuaccacucccugcgaaaucaaagccugcucacucaccugccucaaauccaaaaacaugcucaccaccgucaaagaccucaccaugaaaacccuaaaccccacccacgacaucaucgcccucugcgaauuugaaaacauagucaccuccaaaaaaguaaucauccccaccuaccuccgcuccaucuccguccgcaacaaagaccucaacacacucgaaaacaucacaaccaccgaauuuaaaaacgccaucaccaacgccaaaaucaucccauacuccggccuccuccuagucaucaccgucaccgacaacaaaggcgccuucaaguacaucaaaccacaaucccaauucaucgucgaccucggcgccuaccucgaaaaagaauccaucuacuacguaaccaccaacuggaaacacaccgccacccgcuucgccaucaaacccauggaagacuaaggacuagucccuguucccagagcccacuuuuuuuucuuuuuuugaaauaaaauagccugucuuucagaucuaaaaaaaaaaaaaaaaaaaaaaaaaaaaaaaaaaaaaaaaaaaaaaaaaaaaaaaaaaaaaaaaugcaucccccccccccccccccccccccccccccccaaaggcucuuuucagagccaccagaauu

SEQ ID NO: 19893 - RNA, 1220 nt, Artificial Sequence
  mRNA product Design b-1 comprising derived and/or modified sequence from HRSV(Memphis-37)__AIY60638.1__M (wt)
gggagacggagacggccugcaggaccugcucucucagcccucagccgaggccuacgccgagccgagugcgcagccgacgaccgggaggagccgcagccuucaacucugagguacugugauccgcgcugcccgccgggccgccccaguccgcugcugcggcaccuccuucccucgcgcccucuucgcucgccagcgccuucccugugagccugcgucaccgcggccgccaagcuuaccauggaaacauacgugaacaaacuucacgaaggcuccacauacacagcugcuguucaauacaauguccuagaaaaagacgaugacccugcaucacuuacaauaugggugcccauguuccaaucauccaugccagcagauuuacuuauaaaagaacuagcuaaugucaacauacuagugaaacaaauauccacacccaaaggaccuucauuaagagucaugauaaacucaagaagugcagugcuagcacaaaugcccagcaaauucacuauaugugccaauguguccuuggaugaaagaagcaagcuggcauaugauguaaccacacccugcgaaaucaaggcauguagucuaacaugccuaaaaucaaaaaauauguuaacuacaguuaaagaucucacuaugaaaacacucaacccaacacaugacaucauugcuuuaugugaauuugaaaauauaguaacaucaaaaaaagucauaauaccaacauacuuaagauccaucagugucagaaauaaagaucugaacacacuugaaaauauaacaaccaccgaauucaaaaaugccaucacaaaugcaaaaaucaucccuuacucaggauuacuguuagucaucacagugacugacaacaaaggagcauuuaaauacauaaagccacaaagucaauucauaguagaucuuggagcuuaccuagaaaaagaaaguauauauuauguuacaacaaauuggaagcacacagcuacacgauuugcaaucaaacccauggaagauuaaggacuaguguccaccugucccuccugggcugcuggauugucucguuuuccugccaaauaaacaggaucagcgcuuuacagaucuaaaaaaaaaaaaaaaaaaaaaaaaaaaaaaaaaaaaaaaaaaaaaaaaaaaaaaaaaaaaaaaaugcaucccccccccccccccccccccccccccccccaaaggcucuuuucagagccaccagaauu

SEQ ID NO: 19894 - RNA, 1220 nt, Artificial Sequence; identical to SEQ ID NO: 9734
  mRNA product Design b-1 comprising derived and/or modified sequence from HRSV(Memphis-37)__AIY60638.1__M (opt1)

SEQ ID NO: 19895 - RNA, 1220 nt, Artificial Sequence; identical to SEQ ID NO: 9735
  mRNA product Design b-1 comprising derived and/or modified sequence from HRSV(Memphis-37)__AIY60638.1__M (opt2)

SEQ ID NO: 19896 - RNA, 1220 nt, Artificial Sequence; identical to SEQ ID NO: 9736
  mRNA product Design b-1 comprising derived and/or modified sequence from HRSV(Memphis-37)__AIY60638.1__M (opt3)

SEQ ID NO: 19897 - RNA, 1220 nt, Artificial Sequence; identical to SEQ ID NO: 9737
  mRNA product Design b-1 comprising derived and/or modified sequence from HRSV(Memphis-37)__AIY60638.1__M (opt4)

SEQ ID NO: 19898 - RNA, 1220 nt, Artificial Sequence; identical to SEQ ID NO: 9738
  mRNA product Design b-1 comprising derived and/or modified sequence from HRSV(Memphis-37)__AIY60638.1__M (opt5)

SEQ ID NO: 19899 - RNA, 1220 nt, Artificial Sequence
  mRNA product Design b-1 comprising derived and/or modified sequence from HRSV(Memphis-37)__AIY60638.1__M (opt6)
gggagacggagacggccugcaggaccugcucucucagcccucagccgaggccuacgccgagccgagugcgcagccgacgaccgggaggagccgcagccuucaacucugagguacugugauccgcgcugcccgccgggccgccccaguccgcugcugcggcaccuccuucccucgcgcccucuucgcucgccagcgccuucccugugagccugcgucaccgcggccgccaagcuuaccauggaaacauauguaaacaaauuacacgaaggauccacuuacacagccgcaguacaauacaauguacuagaaaaagacgacgacccagcaucacuaacaauauggguacccauguuccaauccucaaugccagcagaccuccuaauaaaagaacuagcuaauguaaacauacucguaaaacaaauauccacaccaaaaggaccaucacuacgaguaaugauaaacuccagauccgcaguacuagcacaaaugccaucaaaauucacaauaugcgccaacguaucacuagacgaaagaucaaaauuagcauacgacguaacaacaccaugcgaaauaaaagcaugcucacucacaugcuuaaaaucaaaaaacaugcuaacaacaguaaaagaccuaacaaugaaaacacucaaccccacccacgacauaauugccuuaugcgaauuugaaaacauaguaacauccaaaaaaguaauaauaccaacauaccuaagauccauuucaguaagaaacaaagaccuaaacacacuagaaaacauaacaacaacagaauuuaaaaacgcaauaacaaacgcaaaaauaauaccauacucaggauuacuacuuguaauaacaguaacagacaacaaaggagcauucaaauacauaaaaccucaaucacaauuuauaguagaccuaggagcauacuuagaaaaagaaucaaucuauuacgucacuacaaacuggaaacacacagcaaccagauucgcaauaaaacccauggaagacuaaggacuaguguccaccugucccuccugggcugcuggauugucucguuuuccugccaaauaaacaggaucagcgcuuuacagaucuaaaaaaaaaaaaaaaaaaaaaaaaaaaaaaaaaaaaaaaaaaaaaaaaaaaaaaaaaaaaaaaaugcaucccccccccccccccccccccccccccccccaaaggcucuuuucagagccaccagaauu

SEQ ID NO: 19900 - RNA, 1220 nt, Artificial Sequence
  mRNA product Design b-1 comprising derived and/or modified sequence from HRSV(Memphis-37)__AIY60638.1__M (opt11)
gggagacggagacggccugcaggaccugcucucucagcccucagccgaggccuacgccgagccgagugcgcagccgacgaccgggaggagccgcagccuucaacucugagguacugugauccgcgcugcccgccgggccgccccaguccgcugcugcggcaccuccuucccucgcgcccucuucgcucgccagcgccuucccugugagccugcgucaccgcggccgccaagcuuaccauggaaaccuacgucaacaaacuccacgaaggauccaccuacaccgccgccguccaauacaacguccuugaaaaagacgacgaccccgccucccucaccaucuggguccccauguuccaauccucaaugcccgccgaccuccuaaucaaagaacucgccaacgucaacauccucgucaaacaaaucuccacccccaaaggccccucccuccgagucaugaucaacucccgcuccgccguccucgcacaaaugcccuccaaauucaccaucugcgccaacguaucccucgacgaacgcuccaaacucgcauacgacguuaccacucccugcgaaaucaaagccugcucacucaccugccucaaauccaaaaacaugcucaccaccgucaaagaccucaccaugaaaacccuaaaccccacccacgacaucaucgcccucugcgaauuugaaaacauagucaccuccaaaaaaguaaucauccccaccuaccuccgcuccaucuccguccgcaacaaagaccucaacacacucgaaaacaucacaaccaccgaauuuaaaaacgccaucaccaacgccaaaaucaucccauacuccggccuccuccuagucaucaccgucaccgacaacaaaggcgccuucaaguacaucaaaccacaaucccaauucaucgucgaccucggcgccuaccucgaaaaagaauccaucuacuacguaaccaccaacuggaaacacaccgccacccgcuucgccaucaaacccauggaagacuaaggacuaguguccaccugucccuccugggcugcuggauugucucguuuuccugccaaauaaacaggaucagcgcuuuacagaucuaaaaaaaaaaaaaaaaaaaaaaaaaaaaaaaaaaaaaaaaaaaaaaaaaaaaaaaaaaaaaaaaugcaucccccccccccccccccccccccccccccccaaaggcucuuuucagagccaccagaauu

SEQ ID NO: 19901 - RNA, 1040 nt, Artificial Sequence
  mRNA product Design b-2 comprising derived and/or modified sequence from HRSV(Memphis-37)__AIY60638.1__M (wt)
gggagagccucugcuggaguccggggaguggcguuggcugcuagagcgaagcuuaccauggaaacauacgugaacaaacuucacgaaggcuccacauacacagcugcuguucaauacaauguccuagaaaaagacgaugacccugcaucacuuacaauaugggugcccauguuccaaucauccaugccagcagauuuacuuauaaaagaacuagcuaaugucaacauacuagugaaacaaauauccacacccaaaggaccuucauuaagagucaugauaaacucaagaagugcagugcuagcacaaaugcccagcaaauucacuauaugugccaauguguccuuggaugaaagaagcaagcuggcauaugauguaaccacacccugcgaaaucaaggcauguagucuaacaugccuaaaaucaaaaaauauguuaacuacaguuaaagaucucacuaugaaaacacucaacccaacacaugacaucauugcuuuaugugaauuugaaaauauaguaacaucaaaaaaagucauaauaccaacauacuuaagauccaucagugucagaaauaaagaucugaacacacuugaaaauauaacaaccaccgaauucaaaaaugccaucacaaaugcaaaaaucaucccuuacucaggauuacuguuagucaucacagugacugacaacaaaggagcauuuaaauacauaaagccacaaagucaauucauaguagaucuuggagcuuaccuagaaaaagaaaguauauauuauguuacaacaaauuggaagcacacagcuacacgauuugcaaucaaacccauggaagauuaaggacuaguguccaccugucccuccugggcugcuggauugucucguuuuccugccaaauaaacaggaucagcgcuuuacagaucuaaaaaaaaaaaaaaaaaaaaaaaaaaaaaaaaaaaaaaaaaaaaaaaaaaaaaaaaaaaaaaaaugcaucccccccccccccccccccccccccccccccaaaggcucuuuucagagccaccagaauu

SEQ ID NO: 19902 - RNA, 1040 nt, Artificial Sequence; identical to SEQ ID NO: 9742
  mRNA product Design b-2 comprising derived and/or modified sequence from HRSV(Memphis-37)__AIY60638.1__M (opt1)

SEQ ID NO: 19903 - RNA, 1040 nt, Artificial Sequence; identical to SEQ ID NO: 9743
  mRNA product Design b-2 comprising derived and/or modified sequence from HRSV(Memphis-37)__AIY60638.1__M (opt2)

SEQ ID NO: 19904 - RNA, 1040 nt, Artificial Sequence; identical to SEQ ID NO: 9744
  mRNA product Design b-2 comprising derived and/or modified sequence from HRSV(Memphis-37)__AIY60638.1__M (opt3)

SEQ ID NO: 19905 - RNA, 1040 nt, Artificial Sequence; identical to SEQ ID NO: 9745
  mRNA product Design b-2 comprising derived and/or modified sequence from HRSV(Memphis-37)__AIY60638.1__M (opt4)

SEQ ID NO: 19906 - RNA, 1040 nt, Artificial Sequence; identical to SEQ ID NO: 9746
  mRNA product Design b-2 comprising derived and/or modified sequence from HRSV(Memphis-37)__AIY60638.1__M (opt5)

SEQ ID NO: 19907 - RNA, 1040 nt, Artificial Sequence
  mRNA product Design b-2 comprising derived and/or modified sequence from HRSV(Memphis-37)__AIY60638.1__M (opt6)
gggagagccucugcuggaguccggggaguggcguuggcugcuagagcgaagcuuaccauggaaacauauguaaacaaauuacacgaaggauccacuuacacagccgcaguacaauacaauguacuagaaaaagacgacgacccagcaucacuaacaauauggguacccauguuccaauccucaaugccagcagaccuccuaauaaaagaacuagcuaauguaaacauacucguaaaacaaauauccacaccaaaaggaccaucacuacgaguaaugauaaacuccagauccgcaguacuagcacaaaugccaucaaaauucacaauaugcgccaacguaucacuagacgaaagaucaaaauuagcauacgacguaacaacaccaugcgaaauaaaagcaugcucacucacaugcuuaaaaucaaaaaacaugcuaacaacaguaaaagaccuaacaaugaaaacacucaaccccacccacgacauaauugccuuaugcgaauuugaaaacauaguaacauccaaaaaaguaauaauaccaacauaccuaagauccauuucaguaagaaacaaagaccuaaacacacuagaaaacauaacaacaacagaauuuaaaaacgcaauaacaaacgcaaaaauaauaccauacucaggauuacuacuuguaauaacaguaacagacaacaaaggagcauucaaauacauaaaaccucaaucacaauuuauaguagaccuaggagcauacuuagaaaaagaaucaaucuauuacgucacuacaaacuggaaacacacagcaaccagauucgcaauaaaacccauggaagacuaaggacuaguguccaccugucccuccugggcugcuggauugucucguuuuccugccaaauaaacaggaucagcgcuuuacagaucuaaaaaaaaaaaaaaaaaaaaaaaaaaaaaaaaaaaaaaaaaaaaaaaaaaaaaaaaaaaaaaaaugcaucccccccccccccccccccccccccccccccaaaggcucuuuucagagccaccagaauu

SEQ ID NO: 19908 - RNA, 1040 nt, Artificial Sequence
  mRNA product Design b-2 comprising derived and/or modified sequence from HRSV(Memphis-37)__AIY60638.1__M (opt11)
gggagagccucugcuggaguccggggaguggcguuggcugcuagagcgaagcuuaccauggaaaccuacgucaacaaacuccacgaaggauccaccuacaccgccgccguccaauacaacguccuugaaaaagacgacgaccccgccucccucaccaucuggguccccauguuccaauccucaaugcccgccgaccuccuaaucaaagaacucgccaacgucaacauccucgucaaacaaaucuccacccccaaaggccccucccuccgagucaugaucaacucccgcuccgccguccucgcacaaaugcccuccaaauucaccaucugcgccaacguaucccucgacgaacgcuccaaacucgcauacgacguuaccacucccugcgaaaucaaagccugcucacucaccugccucaaauccaaaaacaugcucaccaccgucaaagaccucaccaugaaaacccuaaaccccacccacgacaucaucgcccucugcgaauuugaaaacauagucaccuccaaaaaaguaaucauccccaccuaccuccgcuccaucuccguccgcaacaaagaccucaacacacucgaaaacaucacaaccaccgaauuuaaaaacgccaucaccaacgccaaaaucaucccauacuccggccuccuccuagucaucaccgucaccgacaacaaaggcgccuucaaguacaucaaaccacaaucccaauucaucgucgaccucggcgccuaccucgaaaaagaauccaucuacuacguaaccaccaacuggaaacacaccgccacccgcuucgccaucaaacccauggaagacuaaggacuaguguccaccugucccuccugggcugcuggauugucucguuuuccugccaaauaaacaggaucagcgcuuuacagaucuaaaaaaaaaaaaaaaaaaaaaaaaaaaaaaaaaaaaaaaaaaaaaaaaaaaaaaaaaaaaaaaaugcaucccccccccccccccccccccccccccccccaaaggcucuuuucagagccaccagaauu

SEQ ID NO: 19909 - RNA, 1060 nt, Artificial Sequence
  mRNA product Design b-3 comprising derived and/or modified sequence from HRSV(Memphis-37)__AIY60638.1__M (wt)
gggagagucccgcagucggcguccagcggcucugcuuguucgugugugugucguugcaggccuuauucaagcuuaccauggaaacauacgugaacaaacuucacgaaggcuccacauacacagcugcuguucaauacaauguccuagaaaaagacgaugacccugcaucacuuacaauaugggugcccauguuccaaucauccaugccagcagauuuacuuauaaaagaacuagcuaaugucaacauacuagugaaacaaauauccacacccaaaggaccuucauuaagagucaugauaaacucaagaagugcagugcuagcacaaaugcccagcaaauucacuauaugugccaauguguccuuggaugaaagaagcaagcuggcauaugauguaaccacacccugcgaaaucaaggcauguagucuaacaugccuaaaaucaaaaaauauguuaacuacaguuaaagaucucacuaugaaaacacucaacccaacacaugacaucauugcuuuaugugaauuugaaaauauaguaacaucaaaaaaagucauaauaccaacauacuuaagauccaucagugucagaaauaaagaucugaacacacuugaaaauauaacaaccaccgaauucaaaaaugccaucacaaaugcaaaaaucaucccuuacucaggauuacuguuagucaucacagugacugacaacaaaggagcauuuaaauacauaaagccacaaagucaauucauaguagaucuuggagcuuaccuagaaaaagaaaguauauauuauguuacaacaaauuggaagcacacagcuacacgauuugcaaucaaacccauggaagauuaaggacuaguguccaccugucccuccugggcugcuggauugucucguuuuccugccaaauaaacaggaucagcgcuuuacagaucuaaaaaaaaaaaaaaaaaaaaaaaaaaaaaaaaaaaaaaaaaaaaaaaaaaaaaaaaaaaaaaaaugcaucccccccccccccccccccccccccccccccaaaggcucuuuucagagccaccagaauu

SEQ ID NO: 19910 - RNA, 1060 nt, Artificial Sequence; identical to SEQ ID NO: 9750
  mRNA product Design b-3 comprising derived and/or modified sequence from HRSV(Memphis-37)__AIY60638.1__M (opt1)

SEQ ID NO: 19911 - RNA, 1060 nt, Artificial Sequence; identical to SEQ ID NO: 9751
  mRNA product Design b-3 comprising derived and/or modified sequence from HRSV(Memphis-37)__AIY60638.1__M (opt2)

SEQ ID NO: 19912 - RNA, 1060 nt, Artificial Sequence; identical to SEQ ID NO: 9752
  mRNA product Design b-3 comprising derived and/or modified sequence from HRSV(Memphis-37)__AIY60638.1__M (opt3)

SEQ ID NO: 19913 - RNA, 1060 nt, Artificial Sequence; identical to SEQ ID NO: 9753
  mRNA product Design b-3 comprising derived and/or modified sequence from HRSV(Memphis-37)__AIY60638.1__M (opt4)

SEQ ID NO: 19914 - RNA, 1060 nt, Artificial Sequence; identical to SEQ ID NO: 9754
  mRNA product Design b-3 comprising derived and/or modified sequence from HRSV(Memphis-37)__AIY60638.1__M (opt5)

SEQ ID NO: 19915 - RNA, 1060 nt, Artificial Sequence
  mRNA product Design b-3 comprising derived and/or modified sequence from HRSV(Memphis-37)__AIY60638.1__M (opt6)
gggagagucccgcagucggcguccagcggcucugcuuguucgugugugugucguugcaggccuuauucaagcuuaccauggaaacauauguaaacaaauuacacgaaggauccacuuacacagccgcaguacaauacaauguacuagaaaaagacgacgacccagcaucacuaacaauauggguacccauguuccaauccucaaugccagcagaccuccuaauaaaagaacuagcuaauguaaacauacucguaaaacaaauauccacaccaaaaggaccaucacuacgaguaaugauaaacuccagauccgcaguacuagcacaaaugccaucaaaauucacaauaugcgccaacguaucacuagacgaaagaucaaaauuagcauacgacguaacaacaccaugcgaaauaaaagcaugcucacucacaugcuuaaaaucaaaaaacaugcuaacaacaguaaaagaccuaacaaugaaaacacucaaccccacccacgacauaauugccuuaugcgaauuugaaaacauaguaacauccaaaaaaguaauaauaccaacauaccuaagauccauuucaguaagaaacaaagaccuaaacacacuagaaaacauaacaacaacagaauuuaaaaacgcaauaacaaacgcaaaaauaauaccauacucaggauuacuacuuguaauaacaguaacagacaacaaaggagcauucaaauacauaaaaccucaaucacaauuuauaguagaccuaggagcauacuuagaaaaagaaucaaucuauuacgucacuacaaacuggaaacacacagcaaccagauucgcaauaaaacccauggaagacuaaggacuaguguccaccugucccuccugggcugcuggauugucucguuuuccugccaaauaaacaggaucagcgcuuuacagaucuaaaaaaaaaaaaaaaaaaaaaaaaaaaaaaaaaaaaaaaaaaaaaaaaaaaaaaaaaaaaaaaaugcaucccccccccccccccccccccccccccccccaaaggcucuuuucagagccaccagaauu

SEQ ID NO: 19916 - RNA, 1060 nt, Artificial Sequence
  mRNA product Design b-3 comprising derived and/or modified sequence from HRSV(Memphis-37)__AIY60638.1__M (opt11)
gggagagucccgcagucggcguccagcggcucugcuuguucgugugugugucguugcaggccuuauucaagcuuaccauggaaaccuacgucaacaaacuccacgaaggauccaccuacaccgccgccguccaauacaacguccuugaaaaagacgacgaccccgccucccucaccaucuggguccccauguuccaauccucaaugcccgccgaccuccuaaucaaagaacucgccaacgucaacauccucgucaaacaaaucuccacccccaaaggccccucccuccgagucaugaucaacucccgcuccgccguccucgcacaaaugcccuccaaauucaccaucugcgccaacguaucccucgacgaacgcuccaaacucgcauacgacguuaccacucccugcgaaaucaaagccugcucacucaccugccucaaauccaaaaacaugcucaccaccgucaaagaccucaccaugaaaacccuaaaccccacccacgacaucaucgcccucugcgaauuugaaaacauagucaccuccaaaaaaguaaucauccccaccuaccuccgcuccaucuccguccgcaacaaagaccucaacacacucgaaaacaucacaaccaccgaauuuaaaaacgccaucaccaacgccaaaaucaucccauacuccggccuccuccuagucaucaccgucaccgacaacaaaggcgccuucaaguacaucaaaccacaaucccaauucaucgucgaccucggcgccuaccucgaaaaagaauccaucuacuacguaaccaccaacuggaaacacaccgccacccgcuucgccaucaaacccauggaagacuaaggacuaguguccaccugucccuccugggcugcuggauugucucguuuuccugccaaauaaacaggaucagcgcuuuacagaucuaaaaaaaaaaaaaaaaaaaaaaaaaaaaaaaaaaaaaaaaaaaaaaaaaaaaaaaaaaaaaaaaugcaucccccccccccccccccccccccccccccccaaaggcucuuuucagagccaccagaauu

SEQ ID NO: 19917 - RNA, 1111 nt, Artificial Sequence
  mRNA product Design b-4 comprising derived and/or modified sequence from HRSV(Memphis-37)__AIY60638.1__M (wt)
gggagagucccgcagucggcguccagcggcucugcuuguucgugugugugucguugcaggccuuauucaagcuuaccauggaaacauacgugaacaaacuucacgaaggcuccacauacacagcugcuguucaauacaauguccuagaaaaagacgaugacccugcaucacuuacaauaugggugcccauguuccaaucauccaugccagcagauuuacuuauaaaagaacuagcuaaugucaacauacuagugaaacaaauauccacacccaaaggaccuucauuaagagucaugauaaacucaagaagugcagugcuagcacaaaugcccagcaaauucacuauaugugccaauguguccuuggaugaaagaagcaagcuggcauaugauguaaccacacccugcgaaaucaaggcauguagucuaacaugccuaaaaucaaaaaauauguuaacuacaguuaaagaucucacuaugaaaacacucaacccaacacaugacaucauugcuuuaugugaauuugaaaauauaguaacaucaaaaaaagucauaauaccaacauacuuaagauccaucagugucagaaauaaagaucugaacacacuugaaaauauaacaaccaccgaauucaaaaaugccaucacaaaugcaaaaaucaucccuuacucaggauuacuguuagucaucacagugacugacaacaaaggagcauuuaaauacauaaagccacaaagucaauucauaguagaucuuggagcuuaccuagaaaaagaaaguauauauuauguuacaacaaauuggaagcacacagcuacacgauuugcaaucaaacccauggaagauuaaggacuaguaauaaggaaacuguaugaaugucugugggcaggaagugaagagauccuucuguaaagguuuuuggaauuaugucugcugaauaauaaacuuuuuugaaauaauaaaucugguagaaaaaugagaucuaaaaaaaaaaaaaaaaaaaaaaaaaaaaaaaaaaaaaaaaaaaaaaaaaaaaaaaaaaaaaaaaugcaucccccccccccccccccccccccccccccccaaaggcucuuuucagagccaccagaauu

SEQ ID NO: 19918 - RNA, 1111 nt, Artificial Sequence; identical to SEQ ID NO: 9758
  mRNA product Design b-4 comprising derived and/or modified sequence from HRSV(Memphis-37)__AIY60638.1__M (opt1)

SEQ ID NO: 19919 - RNA, 1111 nt, Artificial Sequence; identical to SEQ ID NO: 9759
  mRNA product Design b-4 comprising derived and/or modified sequence from HRSV(Memphis-37)__AIY60638.1__M (opt2)

SEQ ID NO: 19920 - RNA, 1111 nt, Artificial Sequence; identical to SEQ ID NO: 9760
  mRNA product Design b-4 comprising derived and/or modified sequence from HRSV(Memphis-37)__AIY60638.1__M (opt3)

SEQ ID NO: 19921 - RNA, 1111 nt, Artificial Sequence; identical to SEQ ID NO: 9761
  mRNA product Design b-4 comprising derived and/or modified sequence from HRSV(Memphis-37)__AIY60638.1__M (opt4)

SEQ ID NO: 19922 - RNA, 1111 nt, Artificial Sequence; identical to SEQ ID NO: 9762
  mRNA product Design b-4 comprising derived and/or modified sequence from HRSV(Memphis-37)__AIY60638.1__M (opt5)

SEQ ID NO: 19923 - RNA, 1111 nt, Artificial Sequence
  mRNA product Design b-4 comprising derived and/or modified sequence from HRSV(Memphis-37)__AIY60638.1__M (opt6)
gggagagucccgcagucggcguccagcggcucugcuuguucgugugugugucguugcaggccuuauucaagcuuaccauggaaacauauguaaacaaauuacacgaaggauccacuuacacagccgcaguacaauacaauguacuagaaaaagacgacgacccagcaucacuaacaauauggguacccauguuccaauccucaaugccagcagaccuccuaauaaaagaacuagcuaauguaaacauacucguaaaacaaauauccacaccaaaaggaccaucacuacgaguaaugauaaacuccagauccgcaguacuagcacaaaugccaucaaaauucacaauaugcgccaacguaucacuagacgaaagaucaaaauuagcauacgacguaacaacaccaugcgaaauaaaagcaugcucacucacaugcuuaaaaucaaaaaacaugcuaacaacaguaaaagaccuaacaaugaaaacacucaaccccacccacgacauaauugccuuaugcgaauuugaaaacauaguaacauccaaaaaaguaauaauaccaacauaccuaagauccauuucaguaagaaacaaagaccuaaacacacuagaaaacauaacaacaacagaauuuaaaaacgcaauaacaaacgcaaaaauaauaccauacucaggauuacuacuuguaauaacaguaacagacaacaaaggagcauucaaauacauaaaaccucaaucacaauuuauaguagaccuaggagcauacuuagaaaaagaaucaaucuauuacgucacuacaaacuggaaacacacagcaaccagauucgcaauaaaacccauggaagacuaaggacuaguaauaaggaaacuguaugaaugucugugggcaggaagugaagagauccuucuguaaagguuuuuggaauuaugucugcugaauaauaaacuuuuuugaaauaauaaaucugguagaaaaaugagaucuaaaaaaaaaaaaaaaaaaaaaaaaaaaaaaaaaaaaaaaaaaaaaaaaaaaaaaaaaaaaaaaaugcaucccccccccccccccccccccccccccccccaaaggcucuuuucagagccaccagaauu

SEQ ID NO: 19924 - RNA, 1111 nt, Artificial Sequence
  mRNA product Design b-4 comprising derived and/or modified sequence from HRSV(Memphis-37)__AIY60638.1__M (opt11)
gggagagucccgcagucggcguccagcggcucugcuuguucgugugugugucguugcaggccuuauucaagcuuaccauggaaaccuacgucaacaaacuccacgaaggauccaccuacaccgccgccguccaauacaacguccuugaaaaagacgacgaccccgccucccucaccaucuggguccccauguuccaauccucaaugcccgccgaccuccuaaucaaagaacucgccaacgucaacauccucgucaaacaaaucuccacccccaaaggccccucccuccgagucaugaucaacucccgcuccgccguccucgcacaaaugcccuccaaauucaccaucugcgccaacguaucccucgacgaacgcuccaaacucgcauacgacguuaccacucccugcgaaaucaaagccugcucacucaccugccucaaauccaaaaacaugcucaccaccgucaaagaccucaccaugaaaacccuaaaccccacccacgacaucaucgcccucugcgaauuugaaaacauagucaccuccaaaaaaguaaucauccccaccuaccuccgcuccaucuccguccgcaacaaagaccucaacacacucgaaaacaucacaaccaccgaauuuaaaaacgccaucaccaacgccaaaaucaucccauacuccggccuccuccuagucaucaccgucaccgacaacaaaggcgccuucaaguacaucaaaccacaaucccaauucaucgucgaccucggcgccuaccucgaaaaagaauccaucuacuacguaaccaccaacuggaaacacaccgccacccgcuucgccaucaaacccauggaagacuaaggacuaguaauaaggaaacuguaugaaugucugugggcaggaagugaagagauccuucuguaaagguuuuuggaauuaugucugcugaauaauaaacuuuuuugaaauaauaaaucugguagaaaaaugagaucuaaaaaaaaaaaaaaaaaaaaaaaaaaaaaaaaaaaaaaaaaaaaaaaaaaaaaaaaaaaaaaaaugcaucccccccccccccccccccccccccccccccaaaggcucuuuucagagccaccagaauu

SEQ ID NO: 19925 - RNA, 1173 nt, Artificial Sequence
  mRNA product Design b-5 comprising derived and/or modified sequence from HRSV(Memphis-37)__AIY60638.1__M (wt)
gggagacuccugucgggcggaaguaggaggaguagaguuuaaaaacaguacucuuuuuccgguucgggacguaguugaagcaacgacaagccggauaaccgcucuugagacaggaagcuuaccauggaaacauacgugaacaaacuucacgaaggcuccacauacacagcugcuguucaauacaauguccuagaaaaagacgaugacccugcaucacuuacaauaugggugcccauguuccaaucauccaugccagcagauuuacuuauaaaagaacuagcuaaugucaacauacuagugaaacaaauauccacacccaaaggaccuucauuaagagucaugauaaacucaagaagugcagugcuagcacaaaugcccagcaaauucacuauaugugccaauguguccuuggaugaaagaagcaagcuggcauaugauguaaccacacccugcgaaaucaaggcauguagucuaacaugccuaaaaucaaaaaauauguuaacuacaguuaaagaucucacuaugaaaacacucaacccaacacaugacaucauugcuuuaugugaauuugaaaauauaguaacaucaaaaaaagucauaauaccaacauacuuaagauccaucagugucagaaauaaagaucugaacacacuugaaaauauaacaaccaccgaauucaaaaaugccaucacaaaugcaaaaaucaucccuuacucaggauuacuguuagucaucacagugacugacaacaaaggagcauuuaaauacauaaagccacaaagucaauucauaguagaucuuggagcuuaccuagaaaaagaaaguauauauuauguuacaacaaauuggaagcacacagcuacacgauuugcaaucaaacccauggaagauuaaggacuaguacuggcugcaucucccuuuccucuguccuccauccuucucccaggauggugaagggggaccugguacccagugauccccaccccaggauccuaaaucaugacuuaccugcuaauaaaaacucauuggaaaagugagaagaucuaaaaaaaaaaaaaaaaaaaaaaaaaaaaaaaaaaaaaaaaaaaaaaaaaaaaaaaaaaaaaaaaugcaucccccccccccccccccccccccccccccccaaaggcucuuuucagagccaccagaauu

SEQ ID NO: 19926 - RNA, 1173 nt, Artificial Sequence; identical to SEQ ID NO: 9766
  mRNA product Design b-5 comprising derived and/or modified sequence from HRSV(Memphis-37)__AIY60638.1__M (opt1)

SEQ ID NO: 19927 - RNA, 1173 nt, Artificial Sequence; identical to SEQ ID NO: 9767
  mRNA product Design b-5 comprising derived and/or modified sequence from HRSV(Memphis-37)__AIY60638.1__M (opt2)

SEQ ID NO: 19928 - RNA, 1173 nt, Artificial Sequence; identical to SEQ ID NO: 9768
  mRNA product Design b-5 comprising derived and/or modified sequence from HRSV(Memphis-37)__AIY60638.1__M (opt3)

SEQ ID NO: 19929 - RNA, 1173 nt, Artificial Sequence; identical to SEQ ID NO: 9769
  mRNA product Design b-5 comprising derived and/or modified sequence from HRSV(Memphis-37)__AIY60638.1__M (opt4)

SEQ ID NO: 19930 - RNA, 1173 nt, Artificial Sequence; identical to SEQ ID NO: 9770
  mRNA product Design b-5 comprising derived and/or modified sequence from HRSV(Memphis-37)__AIY60638.1__M (opt5)

SEQ ID NO: 19931 - RNA, 1173 nt, Artificial Sequence
  mRNA product Design b-5 comprising derived and/or modified sequence from HRSV(Memphis-37)__AIY60638.1__M (opt6)
gggagacuccugucgggcggaaguaggaggaguagaguuuaaaaacaguacucuuuuuccgguucgggacguaguugaagcaacgacaagccggauaaccgcucuugagacaggaagcuuaccauggaaacauauguaaacaaauuacacgaaggauccacuuacacagccgcaguacaauacaauguacuagaaaaagacgacgacccagcaucacuaacaauauggguacccauguuccaauccucaaugccagcagaccuccuaauaaaagaacuagcuaauguaaacauacucguaaaacaaauauccacaccaaaaggaccaucacuacgaguaaugauaaacuccagauccgcaguacuagcacaaaugccaucaaaauucacaauaugcgccaacguaucacuagacgaaagaucaaaauuagcauacgacguaacaacaccaugcgaaauaaaagcaugcucacucacaugcuuaaaaucaaaaaacaugcuaacaacaguaaaagaccuaacaaugaaaacacucaaccccacccacgacauaauugccuuaugcgaauuugaaaacauaguaacauccaaaaaaguaauaauaccaacauaccuaagauccauuucaguaagaaacaaagaccuaaacacacuagaaaacauaacaacaacagaauuuaaaaacgcaauaacaaacgcaaaaauaauaccauacucaggauuacuacuuguaauaacaguaacagacaacaaaggagcauucaaauacauaaaaccucaaucacaauuuauaguagaccuaggagcauacuuagaaaaagaaucaaucuauuacgucacuacaaacuggaaacacacagcaaccagauucgcaauaaaacccauggaagacuaaggacuaguacuggcugcaucucccuuuccucuguccuccauccuucucccaggauggugaagggggaccugguacccagugauccccaccccaggauccuaaaucaugacuuaccugcuaauaaaaacucauuggaaaagugagaagaucuaaaaaaaaaaaaaaaaaaaaaaaaaaaaaaaaaaaaaaaaaaaaaaaaaaaaaaaaaaaaaaaaugcaucccccccccccccccccccccccccccccccaaaggcucuuuucagagccaccagaauu

SEQ ID NO: 19932 - RNA, 1173 nt, Artificial Sequence
  mRNA product Design b-5 comprising derived and/or modified sequence from HRSV(Memphis-37)__AIY60638.1__M (opt11)
gggagacuccugucgggcggaaguaggaggaguagaguuuaaaaacaguacucuuuuuccgguucgggacguaguugaagcaacgacaagccggauaaccgcucuugagacaggaagcuuaccauggaaaccuacgucaacaaacuccacgaaggauccaccuacaccgccgccguccaauacaacguccuugaaaaagacgacgaccccgccucccucaccaucuggguccccauguuccaauccucaaugcccgccgaccuccuaaucaaagaacucgccaacgucaacauccucgucaaacaaaucuccacccccaaaggccccucccuccgagucaugaucaacucccgcuccgccguccucgcacaaaugcccuccaaauucaccaucugcgccaacguaucccucgacgaacgcuccaaacucgcauacgacguuaccacucccugcgaaaucaaagccugcucacucaccugccucaaauccaaaaacaugcucaccaccgucaaagaccucaccaugaaaacccuaaaccccacccacgacaucaucgcccucugcgaauuugaaaacauagucaccuccaaaaaaguaaucauccccaccuaccuccgcuccaucuccguccgcaacaaagaccucaacacacucgaaaacaucacaaccaccgaauuuaaaaacgccaucaccaacgccaaaaucaucccauacuccggccuccuccuagucaucaccgucaccgacaacaaaggcgccuucaaguacaucaaaccacaaucccaauucaucgucgaccucggcgccuaccucgaaaaagaauccaucuacuacguaaccaccaacuggaaacacaccgccacccgcuucgccaucaaacccauggaagacuaaggacuaguacuggcugcaucucccuuuccucuguccuccauccuucucccaggauggugaagggggaccugguacccagugauccccaccccaggauccuaaaucaugacuuaccugcuaauaaaaacucauuggaaaagugagaagaucuaaaaaaaaaaaaaaaaaaaaaaaaaaaaaaaaaaaaaaaaaaaaaaaaaaaaaaaaaaaaaaaaugcaucccccccccccccccccccccccccccccccaaaggcucuuuucagagccaccagaauu

SEQ ID NO: 19933 - RNA, 1079 nt, Artificial Sequence
  mRNA product Design c-1 comprising derived and/or modified sequence from HRSV(Memphis-37)__AIY60638.1__M (wt)
gggagaguccgcucagccagguugcagaagcggcuuagcguguguccuaaucuucucucugcguguagguaggccugugccgcaaacaagcuuaccauggaaacauacgugaacaaacuucacgaaggcuccacauacacagcugcuguucaauacaauguccuagaaaaagacgaugacccugcaucacuuacaauaugggugcccauguuccaaucauccaugccagcagauuuacuuauaaaagaacuagcuaaugucaacauacuagugaaacaaauauccacacccaaaggaccuucauuaagagucaugauaaacucaagaagugcagugcuagcacaaaugcccagcaaauucacuauaugugccaauguguccuuggaugaaagaagcaagcuggcauaugauguaaccacacccugcgaaaucaaggcauguagucuaacaugccuaaaaucaaaaaauauguuaacuacaguuaaagaucucacuaugaaaacacucaacccaacacaugacaucauugcuuuaugugaauuugaaaauauaguaacaucaaaaaaagucauaauaccaacauacuuaagauccaucagugucagaaauaaagaucugaacacacuugaaaauauaacaaccaccgaauucaaaaaugccaucacaaaugcaaaaaucaucccuuacucaggauuacuguuagucaucacagugacugacaacaaaggagcauuuaaauacauaaagccacaaagucaauucauaguagaucuuggagcuuaccuagaaaaagaaaguauauauuauguuacaacaaauuggaagcacacagcuacacgauuugcaaucaaacccauggaagauuaaggacuaguguccaccugucccuccugggcugcuggauugucucguuuuccugccaaauaaacaggaucagcgcuuuacagaucuaaaaaaaaaaaaaaaaaaaaaaaaaaaaaaaaaaaaaaaaaaaaaaaaaaaaaaaaaaaaaaaaugcaucccccccccccccccccccccccccccccccaaaggcucuuuucagagccaccagaauu

SEQ ID NO: 19934 - RNA, 1079 nt, Artificial Sequence; identical to SEQ ID NO: 9774
  mRNA product Design c-1 comprising derived and/or modified sequence from HRSV(Memphis-37)__AIY60638.1__M (opt1)

SEQ ID NO: 19935 - RNA, 1079 nt, Artificial Sequence; identical to SEQ ID NO: 9775
  mRNA product Design c-1 comprising derived and/or modified sequence from HRSV(Memphis-37)__AIY60638.1__M (opt2)

SEQ ID NO: 19936 - RNA, 1079 nt, Artificial Sequence; identical to SEQ ID NO: 9776
  mRNA product Design c-1 comprising derived and/or modified sequence from HRSV(Memphis-37)__AIY60638.1__M (opt3)

SEQ ID NO: 19937 - RNA, 1079 nt, Artificial Sequence; identical to SEQ ID NO: 9777
  mRNA product Design c-1 comprising derived and/or modified sequence from HRSV(Memphis-37)__AIY60638.1__M (opt4)

SEQ ID NO: 19938 - RNA, 1079 nt, Artificial Sequence; identical to SEQ ID NO: 9778
  mRNA product Design c-1 comprising derived and/or modified sequence from HRSV(Memphis-37)__AIY60638.1__M (opt5)

SEQ ID NO: 19939 - RNA, 1079 nt, Artificial Sequence
  mRNA product Design c-1 comprising derived and/or modified sequence from HRSV(Memphis-37)__AIY60638.1__M (opt6)
gggagaguccgcucagccagguugcagaagcggcuuagcguguguccuaaucuucucucugcguguagguaggccugugccgcaaacaagcuuaccauggaaacauauguaaacaaauuacacgaaggauccacuuacacagccgcaguacaauacaauguacuagaaaaagacgacgacccagcaucacuaacaauauggguacccauguuccaauccucaaugccagcagaccuccuaauaaaagaacuagcuaauguaaacauacucguaaaacaaauauccacaccaaaaggaccaucacuacgaguaaugauaaacuccagauccgcaguacuagcacaaaugccaucaaaauucacaauaugcgccaacguaucacuagacgaaagaucaaaauuagcauacgacguaacaacaccaugcgaaauaaaagcaugcucacucacaugcuuaaaaucaaaaaacaugcuaacaacaguaaaagaccuaacaaugaaaacacucaaccccacccacgacauaauugccuuaugcgaauuugaaaacauaguaacauccaaaaaaguaauaauaccaacauaccuaagauccauuucaguaagaaacaaagaccuaaacacacuagaaaacauaacaacaacagaauuuaaaaacgcaauaacaaacgcaaaaauaauaccauacucaggauuacuacuuguaauaacaguaacagacaacaaaggagcauucaaauacauaaaaccucaaucacaauuuauaguagaccuaggagcauacuuagaaaaagaaucaaucuauuacgucacuacaaacuggaaacacacagcaaccagauucgcaauaaaacccauggaagacuaaggacuaguguccaccugucccuccugggcugcuggauugucucguuuuccugccaaauaaacaggaucagcgcuuuacagaucuaaaaaaaaaaaaaaaaaaaaaaaaaaaaaaaaaaaaaaaaaaaaaaaaaaaaaaaaaaaaaaaaugcaucccccccccccccccccccccccccccccccaaaggcucuuuucagagccaccagaauu

SEQ ID NO: 19940 - RNA, 1079 nt, Artificial Sequence
  mRNA product Design c-1 comprising derived and/or modified sequence from HRSV(Memphis-37)__AIY60638.1__M (opt11)
gggagaguccgcucagccagguugcagaagcggcuuagcguguguccuaaucuucucucugcguguagguaggccugugccgcaaacaagcuuaccauggaaaccuacgucaacaaacuccacgaaggauccaccuacaccgccgccguccaauacaacguccuugaaaaagacgacgaccccgccucccucaccaucuggguccccauguuccaauccucaaugcccgccgaccuccuaaucaaagaacucgccaacgucaacauccucgucaaacaaaucuccacccccaaaggccccucccuccgagucaugaucaacucccgcuccgccguccucgcacaaaugcccuccaaauucaccaucugcgccaacguaucccucgacgaacgcuccaaacucgcauacgacguuaccacucccugcgaaaucaaagccugcucacucaccugccucaaauccaaaaacaugcucaccaccgucaaagaccucaccaugaaaacccuaaaccccacccacgacaucaucgcccucugcgaauuugaaaacauagucaccuccaaaaaaguaaucauccccaccuaccuccgcuccaucuccguccgcaacaaagaccucaacacacucgaaaacaucacaaccaccgaauuuaaaaacgccaucaccaacgccaaaaucaucccauacuccggccuccuccuagucaucaccgucaccgacaacaaaggcgccuucaaguacaucaaaccacaaucccaauucaucgucgaccucggcgccuaccucgaaaaagaauccaucuacuacguaaccaccaacuggaaacacaccgccacccgcuucgccaucaaacccauggaagacuaaggacuaguguccaccugucccuccugggcugcuggauugucucguuuuccugccaaauaaacaggaucagcgcuuuacagaucuaaaaaaaaaaaaaaaaaaaaaaaaaaaaaaaaaaaaaaaaaaaaaaaaaaaaaaaaaaaaaaaaugcaucccccccccccccccccccccccccccccccaaaggcucuuuucagagccaccagaauu

SEQ ID NO: 19941 - RNA, 1169 nt, Artificial Sequence
  mRNA product Design c-2 comprising derived and/or modified sequence from HRSV(Memphis-37)__AIY60638.1__M (wt)
gggagacuccugucgggcggaaguaggaggaguagaguuuaaaaacaguacucuuuuuccgguucgggacguaguugaagcaacgacaagccggauaaccgcucuugagacaggaagcuuaccauggaaacauacgugaacaaacuucacgaaggcuccacauacacagcugcuguucaauacaauguccuagaaaaagacgaugacccugcaucacuuacaauaugggugcccauguuccaaucauccaugccagcagauuuacuuauaaaagaacuagcuaaugucaacauacuagugaaacaaauauccacacccaaaggaccuucauuaagagucaugauaaacucaagaagugcagugcuagcacaaaugcccagcaaauucacuauaugugccaauguguccuuggaugaaagaagcaagcuggcauaugauguaaccacacccugcgaaaucaaggcauguagucuaacaugccuaaaaucaaaaaauauguuaacuacaguuaaagaucucacuaugaaaacacucaacccaacacaugacaucauugcuuuaugugaauuugaaaauauaguaacaucaaaaaaagucauaauaccaacauacuuaagauccaucagugucagaaauaaagaucugaacacacuugaaaauauaacaaccaccgaauucaaaaaugccaucacaaaugcaaaaaucaucccuuacucaggauuacuguuagucaucacagugacugacaacaaaggagcauuuaaauacauaaagccacaaagucaauucauaguagaucuuggagcuuaccuagaaaaagaaaguauauauuauguuacaacaaauuggaagcacacagcuacacgauuugcaaucaaacccauggaagauuaaggacuaguggaagcauuuuccuggcugauuaaaagaaauuacucagcuauggucaucuguuccuguuagaaggcuaugcagcauauuauauacuaugcgcauguuaugaaaugcauaauaaaaaauuuuaaaaaaucuaaaagaucuaaaaaaaaaaaaaaaaaaaaaaaaaaaaaaaaaaaaaaaaaaaaaaaaaaaaaaaaaaaaaaaaugcaucccccccccccccccccccccccccccccccaaaggcucuuuucagagccaccagaauu

SEQ ID NO: 19942 - RNA, 1169 nt, Artificial Sequence; identical to SEQ ID NO: 9782
  mRNA product Design c-2 comprising derived and/or modified sequence from HRSV(Memphis-37)__AIY60638.1__M (opt1)

SEQ ID NO: 19943 - RNA, 1169 nt, Artificial Sequence; identical to SEQ ID NO: 9783
  mRNA product Design c-2 comprising derived and/or modified sequence from HRSV(Memphis-37)__AIY60638.1__M (opt2)

SEQ ID NO: 19944 - RNA, 1169 nt, Artificial Sequence; identical to SEQ ID NO: 9784
  mRNA product Design c-2 comprising derived and/or modified sequence from HRSV(Memphis-37)__AIY60638.1__M (opt3)

SEQ ID NO: 19945 - RNA, 1169 nt, Artificial Sequence; identical to SEQ ID NO: 9785
  mRNA product Design c-2 comprising derived and/or modified sequence from HRSV(Memphis-37)__AIY60638.1__M (opt4)

SEQ ID NO: 19946 - RNA, 1169 nt, Artificial Sequence; identical to SEQ ID NO: 9786
  mRNA product Design c-2 comprising derived and/or modified sequence from HRSV(Memphis-37)__AIY60638.1__M (opt5)

SEQ ID NO: 19947 - RNA, 1169 nt, Artificial Sequence
  mRNA product Design c-2 comprising derived and/or modified sequence from HRSV(Memphis-37)__AIY60638.1__M (opt6)
gggagacuccugucgggcggaaguaggaggaguagaguuuaaaaacaguacucuuuuuccgguucgggacguaguugaagcaacgacaagccggauaaccgcucuugagacaggaagcuuaccauggaaacauauguaaacaaauuacacgaaggauccacuuacacagccgcaguacaauacaauguacuagaaaaagacgacgacccagcaucacuaacaauauggguacccauguuccaauccucaaugccagcagaccuccuaauaaaagaacuagcuaauguaaacauacucguaaaacaaauauccacaccaaaaggaccaucacuacgaguaaugauaaacuccagauccgcaguacuagcacaaaugccaucaaaauucacaauaugcgccaacguaucacuagacgaaagaucaaaauuagcauacgacguaacaacaccaugcgaaauaaaagcaugcucacucacaugcuuaaaaucaaaaaacaugcuaacaacaguaaaagaccuaacaaugaaaacacucaaccccacccacgacauaauugccuuaugcgaauuugaaaacauaguaacauccaaaaaaguaauaauaccaacauaccuaagauccauuucaguaagaaacaaagaccuaaacacacuagaaaacauaacaacaacagaauuuaaaaacgcaauaacaaacgcaaaaauaauaccauacucaggauuacuacuuguaauaacaguaacagacaacaaaggagcauucaaauacauaaaaccucaaucacaauuuauaguagaccuaggagcauacuuagaaaaagaaucaaucuauuacgucacuacaaacuggaaacacacagcaaccagauucgcaauaaaacccauggaagacuaaggacuaguggaagcauuuuccuggcugauuaaaagaaauuacucagcuauggucaucuguuccuguuagaaggcuaugcagcauauuauauacuaugcgcauguuaugaaaugcauaauaaaaaauuuuaaaaaaucuaaaagaucuaaaaaaaaaaaaaaaaaaaaaaaaaaaaaaaaaaaaaaaaaaaaaaaaaaaaaaaaaaaaaaaaugcaucccccccccccccccccccccccccccccccaaaggcucuuuucagagccaccagaauu

SEQ ID NO: 19948 - RNA, 1169 nt, Artificial Sequence
  mRNA product Design c-2 comprising derived and/or modified sequence from HRSV(Memphis-37)__AIY60638.1__M (opt11)
gggagacuccugucgggcggaaguaggaggaguagaguuuaaaaacaguacucuuuuuccgguucgggacguaguugaagcaacgacaagccggauaaccgcucuugagacaggaagcuuaccauggaaaccuacgucaacaaacuccacgaaggauccaccuacaccgccgccguccaauacaacguccuugaaaaagacgacgaccccgccucccucaccaucuggguccccauguuccaauccucaaugcccgccgaccuccuaaucaaagaacucgccaacgucaacauccucgucaaacaaaucuccacccccaaaggccccucccuccgagucaugaucaacucccgcuccgccguccucgcacaaaugcccuccaaauucaccaucugcgccaacguaucccucgacgaacgcuccaaacucgcauacgacguuaccacucccugcgaaaucaaagccugcucacucaccugccucaaauccaaaaacaugcucaccaccgucaaagaccucaccaugaaaacccuaaaccccacccacgacaucaucgcccucugcgaauuugaaaacauagucaccuccaaaaaaguaaucauccccaccuaccuccgcuccaucuccguccgcaacaaagaccucaacacacucgaaaacaucacaaccaccgaauuuaaaaacgccaucaccaacgccaaaaucaucccauacuccggccuccuccuagucaucaccgucaccgacaacaaaggcgccuucaaguacaucaaaccacaaucccaauucaucgucgaccucggcgccuaccucgaaaaagaauccaucuacuacguaaccaccaacuggaaacacaccgccacccgcuucgccaucaaacccauggaagacuaaggacuaguggaagcauuuuccuggcugauuaaaagaaauuacucagcuauggucaucuguuccuguuagaaggcuaugcagcauauuauauacuaugcgcauguuaugaaaugcauaauaaaaaauuuuaaaaaaucuaaaagaucuaaaaaaaaaaaaaaaaaaaaaaaaaaaaaaaaaaaaaaaaaaaaaaaaaaaaaaaaaaaaaaaaugcaucccccccccccccccccccccccccccccccaaaggcucuuuucagagccaccagaauu

SEQ ID NO: 19949 - RNA, 1146 nt, Artificial Sequence
  mRNA product Design c-3 comprising derived and/or modified sequence from HRSV(Memphis-37)__AIY60638.1__M (wt)
gggagaguccgcucagccagguugcagaagcggcuuagcguguguccuaaucuucucucugcguguagguaggccugugccgcaaacaagcuuaccauggaaacauacgugaacaaacuucacgaaggcuccacauacacagcugcuguucaauacaauguccuagaaaaagacgaugacccugcaucacuuacaauaugggugcccauguuccaaucauccaugccagcagauuuacuuauaaaagaacuagcuaaugucaacauacuagugaaacaaauauccacacccaaaggaccuucauuaagagucaugauaaacucaagaagugcagugcuagcacaaaugcccagcaaauucacuauaugugccaauguguccuuggaugaaagaagcaagcuggcauaugauguaaccacacccugcgaaaucaaggcauguagucuaacaugccuaaaaucaaaaaauauguuaacuacaguuaaagaucucacuaugaaaacacucaacccaacacaugacaucauugcuuuaugugaauuugaaaauauaguaacaucaaaaaaagucauaauaccaacauacuuaagauccaucagugucagaaauaaagaucugaacacacuugaaaauauaacaaccaccgaauucaaaaaugccaucacaaaugcaaaaaucaucccuuacucaggauuacuguuagucaucacagugacugacaacaaaggagcauuuaaauacauaaagccacaaagucaauucauaguagaucuuggagcuuaccuagaaaaagaaaguauauauuauguuacaacaaauuggaagcacacagcuacacgauuugcaaucaaacccauggaagauuaaggacuaguacuggcugcaucucccuuuccucuguccuccauccuucucccaggauggugaagggggaccugguacccagugauccccaccccaggauccuaaaucaugacuuaccugcuaauaaaaacucauuggaaaagugagaagaucuaaaaaaaaaaaaaaaaaaaaaaaaaaaaaaaaaaaaaaaaaaaaaaaaaaaaaaaaaaaaaaaaugcaucccccccccccccccccccccccccccccccaaaggcucuuuucagagccaccagaauu

SEQ ID NO: 19950 - RNA, 1146 nt, Artificial Sequence; identical to SEQ ID NO: 9790
  mRNA product Design c-3 comprising derived and/or modified sequence from HRSV(Memphis-37)__AIY60638.1__M (opt1)

SEQ ID NO: 19951 - RNA, 1146 nt, Artificial Sequence; identical to SEQ ID NO: 9791
  mRNA product Design c-3 comprising derived and/or modified sequence from HRSV(Memphis-37)__AIY60638.1__M (opt2)

SEQ ID NO: 19952 - RNA, 1146 nt, Artificial Sequence; identical to SEQ ID NO: 9792
  mRNA product Design c-3 comprising derived and/or modified sequence from HRSV(Memphis-37)__AIY60638.1__M (opt3)

SEQ ID NO: 19953 - RNA, 1146 nt, Artificial Sequence; identical to SEQ ID NO: 9793
  mRNA product Design c-3 comprising derived and/or modified sequence from HRSV(Memphis-37)__AIY60638.1__M (opt4)

SEQ ID NO: 19954 - RNA, 1146 nt, Artificial Sequence; identical to SEQ ID NO: 9794
  mRNA product Design c-3 comprising derived and/or modified sequence from HRSV(Memphis-37)__AIY60638.1__M (opt5)

SEQ ID NO: 19955 - RNA, 1146 nt, Artificial Sequence
  mRNA product Design c-3 comprising derived and/or modified sequence from HRSV(Memphis-37)__AIY60638.1__M (opt6)
gggagaguccgcucagccagguugcagaagcggcuuagcguguguccuaaucuucucucugcguguagguaggccugugccgcaaacaagcuuaccauggaaacauauguaaacaaauuacacgaaggauccacuuacacagccgcaguacaauacaauguacuagaaaaagacgacgacccagcaucacuaacaauauggguacccauguuccaauccucaaugccagcagaccuccuaauaaaagaacuagcuaauguaaacauacucguaaaacaaauauccacaccaaaaggaccaucacuacgaguaaugauaaacuccagauccgcaguacuagcacaaaugccaucaaaauucacaauaugcgccaacguaucacuagacgaaagaucaaaauuagcauacgacguaacaacaccaugcgaaauaaaagcaugcucacucacaugcuuaaaaucaaaaaacaugcuaacaacaguaaaagaccuaacaaugaaaacacucaaccccacccacgacauaauugccuuaugcgaauuugaaaacauaguaacauccaaaaaaguaauaauaccaacauaccuaagauccauuucaguaagaaacaaagaccuaaacacacuagaaaacauaacaacaacagaauuuaaaaacgcaauaacaaacgcaaaaauaauaccauacucaggauuacuacuuguaauaacaguaacagacaacaaaggagcauucaaauacauaaaaccucaaucacaauuuauaguagaccuaggagcauacuuagaaaaagaaucaaucuauuacgucacuacaaacuggaaacacacagcaaccagauucgcaauaaaacccauggaagacuaaggacuaguacuggcugcaucucccuuuccucuguccuccauccuucucccaggauggugaagggggaccugguacccagugauccccaccccaggauccuaaaucaugacuuaccugcuaauaaaaacucauuggaaaagugagaagaucuaaaaaaaaaaaaaaaaaaaaaaaaaaaaaaaaaaaaaaaaaaaaaaaaaaaaaaaaaaaaaaaaugcaucccccccccccccccccccccccccccccccaaaggcucuuuucagagccaccagaauu

SEQ ID NO: 19956 - RNA, 1146 nt, Artificial Sequence
  mRNA product Design c-3 comprising derived and/or modified sequence from HRSV(Memphis-37)__AIY60638.1__M (opt11)
gggagaguccgcucagccagguugcagaagcggcuuagcguguguccuaaucuucucucugcguguagguaggccugugccgcaaacaagcuuaccauggaaaccuacgucaacaaacuccacgaaggauccaccuacaccgccgccguccaauacaacguccuugaaaaagacgacgaccccgccucccucaccaucuggguccccauguuccaauccucaaugcccgccgaccuccuaaucaaagaacucgccaacgucaacauccucgucaaacaaaucuccacccccaaaggccccucccuccgagucaugaucaacucccgcuccgccguccucgcacaaaugcccuccaaauucaccaucugcgccaacguaucccucgacgaacgcuccaaacucgcauacgacguuaccacucccugcgaaaucaaagccugcucacucaccugccucaaauccaaaaacaugcucaccaccgucaaagaccucaccaugaaaacccuaaaccccacccacgacaucaucgcccucugcgaauuugaaaacauagucaccuccaaaaaaguaaucauccccaccuaccuccgcuccaucuccguccgcaacaaagaccucaacacacucgaaaacaucacaaccaccgaauuuaaaaacgccaucaccaacgccaaaaucaucccauacuccggccuccuccuagucaucaccgucaccgacaacaaaggcgccuucaaguacaucaaaccacaaucccaauucaucgucgaccucggcgccuaccucgaaaaagaauccaucuacuacguaaccaccaacuggaaacacaccgccacccgcuucgccaucaaacccauggaagacuaaggacuaguacuggcugcaucucccuuuccucuguccuccauccuucucccaggauggugaagggggaccugguacccagugauccccaccccaggauccuaaaucaugacuuaccugcuaauaaaaacucauuggaaaagugagaagaucuaaaaaaaaaaaaaaaaaaaaaaaaaaaaaaaaaaaaaaaaaaaaaaaaaaaaaaaaaaaaaaaaugcaucccccccccccccccccccccccccccccccaaaggcucuuuucagagccaccagaauu

SEQ ID NO: 19957 - RNA, 1142 nt, Artificial Sequence
  mRNA product Design c-4 comprising derived and/or modified sequence from HRSV(Memphis-37)__AIY60638.1__M (wt)
gggagaguccgcucagccagguugcagaagcggcuuagcguguguccuaaucuucucucugcguguagguaggccugugccgcaaacaagcuuaccauggaaacauacgugaacaaacuucacgaaggcuccacauacacagcugcuguucaauacaauguccuagaaaaagacgaugacccugcaucacuuacaauaugggugcccauguuccaaucauccaugccagcagauuuacuuauaaaagaacuagcuaaugucaacauacuagugaaacaaauauccacacccaaaggaccuucauuaagagucaugauaaacucaagaagugcagugcuagcacaaaugcccagcaaauucacuauaugugccaauguguccuuggaugaaagaagcaagcuggcauaugauguaaccacacccugcgaaaucaaggcauguagucuaacaugccuaaaaucaaaaaauauguuaacuacaguuaaagaucucacuaugaaaacacucaacccaacacaugacaucauugcuuuaugugaauuugaaaauauaguaacaucaaaaaaagucauaauaccaacauacuuaagauccaucagugucagaaauaaagaucugaacacacuugaaaauauaacaaccaccgaauucaaaaaugccaucacaaaugcaaaaaucaucccuuacucaggauuacuguuagucaucacagugacugacaacaaaggagcauuuaaauacauaaagccacaaagucaauucauaguagaucuuggagcuuaccuagaaaaagaaaguauauauuauguuacaacaaauuggaagcacacagcuacacgauuugcaaucaaacccauggaagauuaaggacuaguggaagcauuuuccuggcugauuaaaagaaauuacucagcuauggucaucuguuccuguuagaaggcuaugcagcauauuauauacuaugcgcauguuaugaaaugcauaauaaaaaauuuuaaaaaaucuaaaagaucuaaaaaaaaaaaaaaaaaaaaaaaaaaaaaaaaaaaaaaaaaaaaaaaaaaaaaaaaaaaaaaaaugcaucccccccccccccccccccccccccccccccaaaggcucuuuucagagccaccagaauu

SEQ ID NO: 19958 - RNA, 1142 nt, Artificial Sequence; identical to SEQ ID NO: 9798
  mRNA product Design c-4 comprising derived and/or modified sequence from HRSV(Memphis-37)__AIY60638.1__M (opt1)

SEQ ID NO: 19959 - RNA, 1142 nt, Artificial Sequence; identical to SEQ ID NO: 9799
  mRNA product Design c-4 comprising derived and/or modified sequence from HRSV(Memphis-37)__AIY60638.1__M (opt2)

SEQ ID NO: 19960 - RNA, 1142 nt, Artificial Sequence; identical to SEQ ID NO: 9800
  mRNA product Design c-4 comprising derived and/or modified sequence from HRSV(Memphis-37)__AIY60638.1__M (opt3)

SEQ ID NO: 19961 - RNA, 1142 nt, Artificial Sequence; identical to SEQ ID NO: 9801
  mRNA product Design c-4 comprising derived and/or modified sequence from HRSV(Memphis-37)__AIY60638.1__M (opt4)

SEQ ID NO: 19962 - RNA, 1142 nt, Artificial Sequence; identical to SEQ ID NO: 9802
  mRNA product Design c-4 comprising derived and/or modified sequence from HRSV(Memphis-37)__AIY60638.1__M (opt5)

SEQ ID NO: 19963 - RNA, 1142 nt, Artificial Sequence
  mRNA product Design c-4 comprising derived and/or modified sequence from HRSV(Memphis-37)__AIY60638.1__M (opt6)
gggagaguccgcucagccagguugcagaagcggcuuagcguguguccuaaucuucucucugcguguagguaggccugugccgcaaacaagcuuaccauggaaacauauguaaacaaauuacacgaaggauccacuuacacagccgcaguacaauacaauguacuagaaaaagacgacgacccagcaucacuaacaauauggguacccauguuccaauccucaaugccagcagaccuccuaauaaaagaacuagcuaauguaaacauacucguaaaacaaauauccacaccaaaaggaccaucacuacgaguaaugauaaacuccagauccgcaguacuagcacaaaugccaucaaaauucacaauaugcgccaacguaucacuagacgaaagaucaaaauuagcauacgacguaacaacaccaugcgaaauaaaagcaugcucacucacaugcuuaaaaucaaaaaacaugcuaacaacaguaaaagaccuaacaaugaaaacacucaaccccacccacgacauaauugccuuaugcgaauuugaaaacauaguaacauccaaaaaaguaauaauaccaacauaccuaagauccauuucaguaagaaacaaagaccuaaacacacuagaaaacauaacaacaacagaauuuaaaaacgcaauaacaaacgcaaaaauaauaccauacucaggauuacuacuuguaauaacaguaacagacaacaaaggagcauucaaauacauaaaaccucaaucacaauuuauaguagaccuaggagcauacuuagaaaaagaaucaaucuauuacgucacuacaaacuggaaacacacagcaaccagauucgcaauaaaacccauggaagacuaaggacuaguggaagcauuuuccuggcugauuaaaagaaauuacucagcuauggucaucuguuccuguuagaaggcuaugcagcauauuauauacuaugcgcauguuaugaaaugcauaauaaaaaauuuuaaaaaaucuaaaagaucuaaaaaaaaaaaaaaaaaaaaaaaaaaaaaaaaaaaaaaaaaaaaaaaaaaaaaaaaaaaaaaaaugcaucccccccccccccccccccccccccccccccaaaggcucuuuucagagccaccagaauu

SEQ ID NO: 19964 - RNA, 1142 nt, Artificial Sequence
  mRNA product Design c-4 comprising derived and/or modified sequence from HRSV(Memphis-37)__AIY60638.1__M (opt11)
gggagaguccgcucagccagguugcagaagcggcuuagcguguguccuaaucuucucucugcguguagguaggccugugccgcaaacaagcuuaccauggaaaccuacgucaacaaacuccacgaaggauccaccuacaccgccgccguccaauacaacguccuugaaaaagacgacgaccccgccucccucaccaucuggguccccauguuccaauccucaaugcccgccgaccuccuaaucaaagaacucgccaacgucaacauccucgucaaacaaaucuccacccccaaaggccccucccuccgagucaugaucaacucccgcuccgccguccucgcacaaaugcccuccaaauucaccaucugcgccaacguaucccucgacgaacgcuccaaacucgcauacgacguuaccacucccugcgaaaucaaagccugcucacucaccugccucaaauccaaaaacaugcucaccaccgucaaagaccucaccaugaaaacccuaaaccccacccacgacaucaucgcccucugcgaauuugaaaacauagucaccuccaaaaaaguaaucauccccaccuaccuccgcuccaucuccguccgcaacaaagaccucaacacacucgaaaacaucacaaccaccgaauuuaaaaacgccaucaccaacgccaaaaucaucccauacuccggccuccuccuagucaucaccgucaccgacaacaaaggcgccuucaaguacaucaaaccacaaucccaauucaucgucgaccucggcgccuaccucgaaaaagaauccaucuacuacguaaccaccaacuggaaacacaccgccacccgcuucgccaucaaacccauggaagacuaaggacuaguggaagcauuuuccuggcugauuaaaagaaauuacucagcuauggucaucuguuccuguuagaaggcuaugcagcauauuauauacuaugcgcauguuaugaaaugcauaauaaaaaauuuuaaaaaaucuaaaagaucuaaaaaaaaaaaaaaaaaaaaaaaaaaaaaaaaaaaaaaaaaaaaaaaaaaaaaaaaaaaaaaaaugcaucccccccccccccccccccccccccccccccaaaggcucuuuucagagccaccagaauu

SEQ ID NO: 19965 - RNA, 1060 nt, Artificial Sequence
  mRNA product Design c-5 comprising derived and/or modified sequence from HRSV(Memphis-37)__AIY60638.1__M (wt)
gggagagcggcucggccauuuugucccagucaguccggaggcugcggcugcagaaguaccgccugcggaguaacugcaaagaagcuuaccauggaaacauacgugaacaaacuucacgaaggcuccacauacacagcugcuguucaauacaauguccuagaaaaagacgaugacccugcaucacuuacaauaugggugcccauguuccaaucauccaugccagcagauuuacuuauaaaagaacuagcuaaugucaacauacuagugaaacaaauauccacacccaaaggaccuucauuaagagucaugauaaacucaagaagugcagugcuagcacaaaugcccagcaaauucacuauaugugccaauguguccuuggaugaaagaagcaagcuggcauaugauguaaccacacccugcgaaaucaaggcauguagucuaacaugccuaaaaucaaaaaauauguuaacuacaguuaaagaucucacuaugaaaacacucaacccaacacaugacaucauugcuuuaugugaauuugaaaauauaguaacaucaaaaaaagucauaauaccaacauacuuaagauccaucagugucagaaauaaagaucugaacacacuugaaaauauaacaaccaccgaauucaaaaaugccaucacaaaugcaaaaaucaucccuuacucaggauuacuguuagucaucacagugacugacaacaaaggagcauuuaaauacauaaagccacaaagucaauucauaguagaucuuggagcuuaccuagaaaaagaaaguauauauuauguuacaacaaauuggaagcacacagcuacacgauuugcaaucaaacccauggaagauuaaggacuagucccuguucccagagcccacuuuuuuuucuuuuuuugaaauaaaauagccugucuuucagaucuaaaaaaaaaaaaaaaaaaaaaaaaaaaaaaaaaaaaaaaaaaaaaaaaaaaaaaaaaaaaaaaaugcaucccccccccccccccccccccccccccccccaaaggcucuuuucagagccaccagaauu

SEQ ID NO: 19966 - RNA, 1060 nt, Artificial Sequence; identical to SEQ ID NO: 9806
  mRNA product Design c-5 comprising derived and/or modified sequence from HRSV(Memphis-37)__AIY60638.1__M (opt1)

SEQ ID NO: 19967 - RNA, 1060 nt, Artificial Sequence; identical to SEQ ID NO: 9807
  mRNA product Design c-5 comprising derived and/or modified sequence from HRSV(Memphis-37)__AIY60638.1__M (opt2)

SEQ ID NO: 19968 - RNA, 1060 nt, Artificial Sequence; identical to SEQ ID NO: 9808
  mRNA product Design c-5 comprising derived and/or modified sequence from HRSV(Memphis-37)__AIY60638.1__M (opt3)

SEQ ID NO: 19969 - RNA, 1060 nt, Artificial Sequence; identical to SEQ ID NO: 9809
  mRNA product Design c-5 comprising derived and/or modified sequence from HRSV(Memphis-37)__AIY60638.1__M (opt4)

SEQ ID NO: 19970 - RNA, 1060 nt, Artificial Sequence; identical to SEQ ID NO: 9810
  mRNA product Design c-5 comprising derived and/or modified sequence from HRSV(Memphis-37)__AIY60638.1__M (opt5)

SEQ ID NO: 19971 - RNA, 1060 nt, Artificial Sequence
  mRNA product Design c-5 comprising derived and/or modified sequence from HRSV(Memphis-37)__AIY60638.1__M (opt6)
gggagagcggcucggccauuuugucccagucaguccggaggcugcggcugcagaaguaccgccugcggaguaacugcaaagaagcuuaccauggaaacauauguaaacaaauuacacgaaggauccacuuacacagccgcaguacaauacaauguacuagaaaaagacgacgacccagcaucacuaacaauauggguacccauguuccaauccucaaugccagcagaccuccuaauaaaagaacuagcuaauguaaacauacucguaaaacaaauauccacaccaaaaggaccaucacuacgaguaaugauaaacuccagauccgcaguacuagcacaaaugccaucaaaauucacaauaugcgccaacguaucacuagacgaaagaucaaaauuagcauacgacguaacaacaccaugcgaaauaaaagcaugcucacucacaugcuuaaaaucaaaaaacaugcuaacaacaguaaaagaccuaacaaugaaaacacucaaccccacccacgacauaauugccuuaugcgaauuugaaaacauaguaacauccaaaaaaguaauaauaccaacauaccuaagauccauuucaguaagaaacaaagaccuaaacacacuagaaaacauaacaacaacagaauuuaaaaacgcaauaacaaacgcaaaaauaauaccauacucaggauuacuacuuguaauaacaguaacagacaacaaaggagcauucaaauacauaaaaccucaaucacaauuuauaguagaccuaggagcauacuuagaaaaagaaucaaucuauuacgucacuacaaacuggaaacacacagcaaccagauucgcaauaaaacccauggaagacuaaggacuagucccuguucccagagcccacuuuuuuuucuuuuuuugaaauaaaauagccugucuuucagaucuaaaaaaaaaaaaaaaaaaaaaaaaaaaaaaaaaaaaaaaaaaaaaaaaaaaaaaaaaaaaaaaaugcaucccccccccccccccccccccccccccccccaaaggcucuuuucagagccaccagaauu

SEQ ID NO: 19972 - RNA, 1060 nt, Artificial Sequence
  mRNA product Design c-5 comprising derived and/or modified sequence from HRSV(Memphis-37)__AIY60638.1__M (opt11)
gggagagcggcucggccauuuugucccagucaguccggaggcugcggcugcagaaguaccgccugcggaguaacugcaaagaagcuuaccauggaaaccuacgucaacaaacuccacgaaggauccaccuacaccgccgccguccaauacaacguccuugaaaaagacgacgaccccgccucccucaccaucuggguccccauguuccaauccucaaugcccgccgaccuccuaaucaaagaacucgccaacgucaacauccucgucaaacaaaucuccacccccaaaggccccucccuccgagucaugaucaacucccgcuccgccguccucgcacaaaugcccuccaaauucaccaucugcgccaacguaucccucgacgaacgcuccaaacucgcauacgacguuaccacucccugcgaaaucaaagccugcucacucaccugccucaaauccaaaaacaugcucaccaccgucaaagaccucaccaugaaaacccuaaaccccacccacgacaucaucgcccucugcgaauuugaaaacauagucaccuccaaaaaaguaaucauccccaccuaccuccgcuccaucuccguccgcaacaaagaccucaacacacucgaaaacaucacaaccaccgaauuuaaaaacgccaucaccaacgccaaaaucaucccauacuccggccuccuccuagucaucaccgucaccgacaacaaaggcgccuucaaguacaucaaaccacaaucccaauucaucgucgaccucggcgccuaccucgaaaaagaauccaucuacuacguaaccaccaacuggaaacacaccgccacccgcuucgccaucaaacccauggaagacuaaggacuagucccuguucccagagcccacuuuuuuuucuuuuuuugaaauaaaauagccugucuuucagaucuaaaaaaaaaaaaaaaaaaaaaaaaaaaaaaaaaaaaaaaaaaaaaaaaaaaaaaaaaaaaaaaaugcaucccccccccccccccccccccccccccccccaaaggcucuuuucagagccaccagaauu

SEQ ID NO: 19973 - RNA, 1069 nt, Artificial Sequence
  mRNA product Design d-1 comprising derived and/or modified sequence from HRSV(Memphis-37)__AIY60638.1__M (wt)
gggagacccgugacccggaaguuguacggcuacgcgacuuucccucccacaaacccucgcgcccuuccuuuccuacuugggcccggcagaaagcuuaccauggaaacauacgugaacaaacuucacgaaggcuccacauacacagcugcuguucaauacaauguccuagaaaaagacgaugacccugcaucacuuacaauaugggugcccauguuccaaucauccaugccagcagauuuacuuauaaaagaacuagcuaaugucaacauacuagugaaacaaauauccacacccaaaggaccuucauuaagagucaugauaaacucaagaagugcagugcuagcacaaaugcccagcaaauucacuauaugugccaauguguccuuggaugaaagaagcaagcuggcauaugauguaaccacacccugcgaaaucaaggcauguagucuaacaugccuaaaaucaaaaaauauguuaacuacaguuaaagaucucacuaugaaaacacucaacccaacacaugacaucauugcuuuaugugaauuugaaaauauaguaacaucaaaaaaagucauaauaccaacauacuuaagauccaucagugucagaaauaaagaucugaacacacuugaaaauauaacaaccaccgaauucaaaaaugccaucacaaaugcaaaaaucaucccuuacucaggauuacuguuagucaucacagugacugacaacaaaggagcauuuaaauacauaaagccacaaagucaauucauaguagaucuuggagcuuaccuagaaaaagaaaguauauauuauguuacaacaaauuggaagcacacagcuacacgauuugcaaucaaacccauggaagauuaaggacuagucccuguucccagagcccacuuuuuuuucuuuuuuugaaauaaaauagccugucuuucagaucuaaaaaaaaaaaaaaaaaaaaaaaaaaaaaaaaaaaaaaaaaaaaaaaaaaaaaaaaaaaaaaaaugcaucccccccccccccccccccccccccccccccaaaggcucuuuucagagccaccagaauu

SEQ ID NO: 19974 - RNA, 1069 nt, Artificial Sequence; identical to SEQ ID NO: 9814
  mRNA product Design d-1 comprising derived and/or modified sequence from HRSV(Memphis-37)__AIY60638.1__M (opt1)

SEQ ID NO: 19975 - RNA, 1069 nt, Artificial Sequence; identical to SEQ ID NO: 9815
  mRNA product Design d-1 comprising derived and/or modified sequence from HRSV(Memphis-37)__AIY60638.1__M (opt2)

SEQ ID NO: 19976 - RNA, 1069 nt, Artificial Sequence; identical to SEQ ID NO: 9816
  mRNA product Design d-1 comprising derived and/or modified sequence from HRSV(Memphis-37)__AIY60638.1__M (opt3)

SEQ ID NO: 19977 - RNA, 1069 nt, Artificial Sequence; identical to SEQ ID NO: 9817
  mRNA product Design d-1 comprising derived and/or modified sequence from HRSV(Memphis-37)__AIY60638.1__M (opt4)

SEQ ID NO: 19978 - RNA, 1069 nt, Artificial Sequence; identical to SEQ ID NO: 9818
  mRNA product Design d-1 comprising derived and/or modified sequence from HRSV(Memphis-37)__AIY60638.1__M (opt5)

SEQ ID NO: 19979 - RNA, 1069 nt, Artificial Sequence
  mRNA product Design d-1 comprising derived and/or modified sequence from HRSV(Memphis-37)__AIY60638.1__M (opt6)
gggagacccgugacccggaaguuguacggcuacgcgacuuucccucccacaaacccucgcgcccuuccuuuccuacuugggcccggcagaaagcuuaccauggaaacauauguaaacaaauuacacgaaggauccacuuacacagccgcaguacaauacaauguacuagaaaaagacgacgacccagcaucacuaacaauauggguacccauguuccaauccucaaugccagcagaccuccuaauaaaagaacuagcuaauguaaacauacucguaaaacaaauauccacaccaaaaggaccaucacuacgaguaaugauaaacuccagauccgcaguacuagcacaaaugccaucaaaauucacaauaugcgccaacguaucacuagacgaaagaucaaaauuagcauacgacguaacaacaccaugcgaaauaaaagcaugcucacucacaugcuuaaaaucaaaaaacaugcuaacaacaguaaaagaccuaacaaugaaaacacucaaccccacccacgacauaauugccuuaugcgaauuugaaaacauaguaacauccaaaaaaguaauaauaccaacauaccuaagauccauuucaguaagaaacaaagaccuaaacacacuagaaaacauaacaacaacagaauuuaaaaacgcaauaacaaacgcaaaaauaauaccauacucaggauuacuacuuguaauaacaguaacagacaacaaaggagcauucaaauacauaaaaccucaaucacaauuuauaguagaccuaggagcauacuuagaaaaagaaucaaucuauuacgucacuacaaacuggaaacacacagcaaccagauucgcaauaaaacccauggaagacuaaggacuagucccuguucccagagcccacuuuuuuuucuuuuuuugaaauaaaauagccugucuuucagaucuaaaaaaaaaaaaaaaaaaaaaaaaaaaaaaaaaaaaaaaaaaaaaaaaaaaaaaaaaaaaaaaaugcaucccccccccccccccccccccccccccccccaaaggcucuuuucagagccaccagaauu

SEQ ID NO: 19980 - RNA, 1069 nt, Artificial Sequence
  mRNA product Design d-1 comprising derived and/or modified sequence from HRSV(Memphis-37)__AIY60638.1__M (opt11)
gggagacccgugacccggaaguuguacggcuacgcgacuuucccucccacaaacccucgcgcccuuccuuuccuacuugggcccggcagaaagcuuaccauggaaaccuacgucaacaaacuccacgaaggauccaccuacaccgccgccguccaauacaacguccuugaaaaagacgacgaccccgccucccucaccaucuggguccccauguuccaauccucaaugcccgccgaccuccuaaucaaagaacucgccaacgucaacauccucgucaaacaaaucuccacccccaaaggccccucccuccgagucaugaucaacucccgcuccgccguccucgcacaaaugcccuccaaauucaccaucugcgccaacguaucccucgacgaacgcuccaaacucgcauacgacguuaccacucccugcgaaaucaaagccugcucacucaccugccucaaauccaaaaacaugcucaccaccgucaaagaccucaccaugaaaacccuaaaccccacccacgacaucaucgcccucugcgaauuugaaaacauagucaccuccaaaaaaguaaucauccccaccuaccuccgcuccaucuccguccgcaacaaagaccucaacacacucgaaaacaucacaaccaccgaauuuaaaaacgccaucaccaacgccaaaaucaucccauacuccggccuccuccuagucaucaccgucaccgacaacaaaggcgccuucaaguacaucaaaccacaaucccaauucaucgucgaccucggcgccuaccucgaaaaagaauccaucuacuacguaaccaccaacuggaaacacaccgccacccgcuucgccaucaaacccauggaagacuaaggacuagucccuguucccagagcccacuuuuuuuucuuuuuuugaaauaaaauagccugucuuucagaucuaaaaaaaaaaaaaaaaaaaaaaaaaaaaaaaaaaaaaaaaaaaaaaaaaaaaaaaaaaaaaaaaugcaucccccccccccccccccccccccccccccccaaaggcucuuuucagagccaccagaauu

SEQ ID NO: 19981 - RNA, 1124 nt, Artificial Sequence
  mRNA product Design d-2 comprising derived and/or modified sequence from HRSV(Memphis-37)__AIY60638.1__M (wt)
gggagagcggcucggccauuuugucccagucaguccggaggcugcggcugcagaaguaccgccugcggaguaacugcaaagaagcuuaccauggaaacauacgugaacaaacuucacgaaggcuccacauacacagcugcuguucaauacaauguccuagaaaaagacgaugacccugcaucacuuacaauaugggugcccauguuccaaucauccaugccagcagauuuacuuauaaaagaacuagcuaaugucaacauacuagugaaacaaauauccacacccaaaggaccuucauuaagagucaugauaaacucaagaagugcagugcuagcacaaaugcccagcaaauucacuauaugugccaauguguccuuggaugaaagaagcaagcuggcauaugauguaaccacacccugcgaaaucaaggcauguagucuaacaugccuaaaaucaaaaaauauguuaacuacaguuaaagaucucacuaugaaaacacucaacccaacacaugacaucauugcuuuaugugaauuugaaaauauaguaacaucaaaaaaagucauaauaccaacauacuuaagauccaucagugucagaaauaaagaucugaacacacuugaaaauauaacaaccaccgaauucaaaaaugccaucacaaaugcaaaaaucaucccuuacucaggauuacuguuagucaucacagugacugacaacaaaggagcauuuaaauacauaaagccacaaagucaauucauaguagaucuuggagcuuaccuagaaaaagaaaguauauauuauguuacaacaaauuggaagcacacagcuacacgauuugcaaucaaacccauggaagauuaaggacuaguaauaaggaaacuguaugaaugucugugggcaggaagugaagagauccuucuguaaagguuuuuggaauuaugucugcugaauaauaaacuuuuuugaaauaauaaaucugguagaaaaaugagaucuaaaaaaaaaaaaaaaaaaaaaaaaaaaaaaaaaaaaaaaaaaaaaaaaaaaaaaaaaaaaaaaaugcaucccccccccccccccccccccccccccccccaaaggcucuuuucagagccaccagaauu

SEQ ID NO: 19982 - RNA, 1124 nt, Artificial Sequence; identical to SEQ ID NO: 9822
  mRNA product Design d-2 comprising derived and/or modified sequence from HRSV(Memphis-37)__AIY60638.1__M (opt1)

SEQ ID NO: 19983 - RNA, 1124 nt, Artificial Sequence; identical to SEQ ID NO: 9823
  mRNA product Design d-2 comprising derived and/or modified sequence from HRSV(Memphis-37)__AIY60638.1__M (opt2)

SEQ ID NO: 19984 - RNA, 1124 nt, Artificial Sequence; identical to SEQ ID NO: 9824
  mRNA product Design d-2 comprising derived and/or modified sequence from HRSV(Memphis-37)__AIY60638.1__M (opt3)

SEQ ID NO: 19985 - RNA, 1124 nt, Artificial Sequence; identical to SEQ ID NO: 9825
  mRNA product Design d-2 comprising derived and/or modified sequence from HRSV(Memphis-37)__AIY60638.1__M (opt4)

SEQ ID NO: 19986 - RNA, 1124 nt, Artificial Sequence; identical to SEQ ID NO: 9826
  mRNA product Design d-2 comprising derived and/or modified sequence from HRSV(Memphis-37)__AIY60638.1__M (opt5)

SEQ ID NO: 19987 - RNA, 1124 nt, Artificial Sequence
  mRNA product Design d-2 comprising derived and/or modified sequence from HRSV(Memphis-37)__AIY60638.1__M (opt6)
gggagagcggcucggccauuuugucccagucaguccggaggcugcggcugcagaaguaccgccugcggaguaacugcaaagaagcuuaccauggaaacauauguaaacaaauuacacgaaggauccacuuacacagccgcaguacaauacaauguacuagaaaaagacgacgacccagcaucacuaacaauauggguacccauguuccaauccucaaugccagcagaccuccuaauaaaagaacuagcuaauguaaacauacucguaaaacaaauauccacaccaaaaggaccaucacuacgaguaaugauaaacuccagauccgcaguacuagcacaaaugccaucaaaauucacaauaugcgccaacguaucacuagacgaaagaucaaaauuagcauacgacguaacaacaccaugcgaaauaaaagcaugcucacucacaugcuuaaaaucaaaaaacaugcuaacaacaguaaaagaccuaacaaugaaaacacucaaccccacccacgacauaauugccuuaugcgaauuugaaaacauaguaacauccaaaaaaguaauaauaccaacauaccuaagauccauuucaguaagaaacaaagaccuaaacacacuagaaaacauaacaacaacagaauuuaaaaacgcaauaacaaacgcaaaaauaauaccauacucaggauuacuacuuguaauaacaguaacagacaacaaaggagcauucaaauacauaaaaccucaaucacaauuuauaguagaccuaggagcauacuuagaaaaagaaucaaucuauuacgucacuacaaacuggaaacacacagcaaccagauucgcaauaaaacccauggaagacuaaggacuaguaauaaggaaacuguaugaaugucugugggcaggaagugaagagauccuucuguaaagguuuuuggaauuaugucugcugaauaauaaacuuuuuugaaauaauaaaucugguagaaaaaugagaucuaaaaaaaaaaaaaaaaaaaaaaaaaaaaaaaaaaaaaaaaaaaaaaaaaaaaaaaaaaaaaaaaugcaucccccccccccccccccccccccccccccccaaaggcucuuuucagagccaccagaauu

SEQ ID NO: 19988 - RNA, 1124 nt, Artificial Sequence
  mRNA product Design d-2 comprising derived and/or modified sequence from HRSV(Memphis-37)__AIY60638.1__M (opt11)
gggagagcggcucggccauuuugucccagucaguccggaggcugcggcugcagaaguaccgccugcggaguaacugcaaagaagcuuaccauggaaaccuacgucaacaaacuccacgaaggauccaccuacaccgccgccguccaauacaacguccuugaaaaagacgacgaccccgccucccucaccaucuggguccccauguuccaauccucaaugcccgccgaccuccuaaucaaagaacucgccaacgucaacauccucgucaaacaaaucuccacccccaaaggccccucccuccgagucaugaucaacucccgcuccgccguccucgcacaaaugcccuccaaauucaccaucugcgccaacguaucccucgacgaacgcuccaaacucgcauacgacguuaccacucccugcgaaaucaaagccugcucacucaccugccucaaauccaaaaacaugcucaccaccgucaaagaccucaccaugaaaacccuaaaccccacccacgacaucaucgcccucugcgaauuugaaaacauagucaccuccaaaaaaguaaucauccccaccuaccuccgcuccaucuccguccgcaacaaagaccucaacacacucgaaaacaucacaaccaccgaauuuaaaaacgccaucaccaacgccaaaaucaucccauacuccggccuccuccuagucaucaccgucaccgacaacaaaggcgccuucaaguacaucaaaccacaaucccaauucaucgucgaccucggcgccuaccucgaaaaagaauccaucuacuacguaaccaccaacuggaaacacaccgccacccgcuucgccaucaaacccauggaagacuaaggacuaguaauaaggaaacuguaugaaugucugugggcaggaagugaagagauccuucuguaaagguuuuuggaauuaugucugcugaauaauaaacuuuuuugaaauaauaaaucugguagaaaaaugagaucuaaaaaaaaaaaaaaaaaaaaaaaaaaaaaaaaaaaaaaaaaaaaaaaaaaaaaaaaaaaaaaaaugcaucccccccccccccccccccccccccccccccaaaggcucuuuucagagccaccagaauu

SEQ ID NO: 19989 - RNA, 1440 nt, Artificial Sequence
  mRNA product Design d-3 comprising derived and/or modified sequence from HRSV(Memphis-37)__AIY60638.1__M (wt)
gggagagggcgcuuggcuugcaaggacccugagcugcggcauugaagcacacccaacccaacucgacugaagucagccucacugaaccggaucugagaaucuucucucucugggcuugccagggcucuccgaaccuagcuagcauccucuucaauuccaacuagaaagcuuaccauggaaacauacgugaacaaacuucacgaaggcuccacauacacagcugcuguucaauacaauguccuagaaaaagacgaugacccugcaucacuuacaauaugggugcccauguuccaaucauccaugccagcagauuuacuuauaaaagaacuagcuaaugucaacauacuagugaaacaaauauccacacccaaaggaccuucauuaagagucaugauaaacucaagaagugcagugcuagcacaaaugcccagcaaauucacuauaugugccaauguguccuuggaugaaagaagcaagcuggcauaugauguaaccacacccugcgaaaucaaggcauguagucuaacaugccuaaaaucaaaaaauauguuaacuacaguuaaagaucucacuaugaaaacacucaacccaacacaugacaucauugcuuuaugugaauuugaaaauauaguaacaucaaaaaaagucauaauaccaacauacuuaagauccaucagugucagaaauaaagaucugaacacacuugaaaauauaacaaccaccgaauucaaaaaugccaucacaaaugcaaaaaucaucccuuacucaggauuacuguuagucaucacagugacugacaacaaaggagcauuuaaauacauaaagccacaaagucaauucauaguagaucuuggagcuuaccuagaaaaagaaaguauauauuauguuacaacaaauuggaagcacacagcuacacgauuugcaaucaaacccauggaagauuaaggacuagugaagggaacacccaaauuuaauucagccuuaagcacaauuaauuaagagugaaacguaauuguacaagcaguuggucacccaccauagggcaugaucaacaccgcaaccuuuccuuuuucccccagugauucugaaaaaccccucuucccuucagcuugcuuagauguuccaaauuuaguaagcuuaaggcggccuacagaagaaaaagaaaaaaaaggccacaaaaguucccucucacuuucaguaaauaaaauaaaagcagcaacagaaauaaagaaauaaaugaaauucaaaaugaaauaaauauuguguugugcagcauuaaaaaaucaauaaaaauuaaaaaugagcaagaucuaaaaaaaaaaaaaaaaaaaaaaaaaaaaaaaaaaaaaaaaaaaaaaaaaaaaaaaaaaaaaaaaugcaucccccccccccccccccccccccccccccccaaaggcucuuuucagagccaccagaauu

SEQ ID NO: 19990 - RNA, 1440 nt, Artificial Sequence; identical to SEQ ID NO: 9830
  mRNA product Design d-3 comprising derived and/or modified sequence from HRSV(Memphis-37)__AIY60638.1__M (opt1)

SEQ ID NO: 19991 - RNA, 1440 nt, Artificial Sequence; identical to SEQ ID NO: 9831
  mRNA product Design d-3 comprising derived and/or modified sequence from HRSV(Memphis-37)__AIY60638.1__M (opt2)

SEQ ID NO: 19992 - RNA, 1440 nt, Artificial Sequence; identical to SEQ ID NO: 9832
  mRNA product Design d-3 comprising derived and/or modified sequence from HRSV(Memphis-37)__AIY60638.1__M (opt3)

SEQ ID NO: 19993 - RNA, 1440 nt, Artificial Sequence; identical to SEQ ID NO: 9833
  mRNA product Design d-3 comprising derived and/or modified sequence from HRSV(Memphis-37)__AIY60638.1__M (opt4)

SEQ ID NO: 19994 - RNA, 1440 nt, Artificial Sequence; identical to SEQ ID NO: 9834
  mRNA product Design d-3 comprising derived and/or modified sequence from HRSV(Memphis-37)__AIY60638.1__M (opt5)

SEQ ID NO: 19995 - RNA, 1440 nt, Artificial Sequence
  mRNA product Design d-3 comprising derived and/or modified sequence from HRSV(Memphis-37)__AIY60638.1__M (opt6)
gggagagggcgcuuggcuugcaaggacccugagcugcggcauugaagcacacccaacccaacucgacugaagucagccucacugaaccggaucugagaaucuucucucucugggcuugccagggcucuccgaaccuagcuagcauccucuucaauuccaacuagaaagcuuaccauggaaacauauguaaacaaauuacacgaaggauccacuuacacagccgcaguacaauacaauguacuagaaaaagacgacgacccagcaucacuaacaauauggguacccauguuccaauccucaaugccagcagaccuccuaauaaaagaacuagcuaauguaaacauacucguaaaacaaauauccacaccaaaaggaccaucacuacgaguaaugauaaacuccagauccgcaguacuagcacaaaugccaucaaaauucacaauaugcgccaacguaucacuagacgaaagaucaaaauuagcauacgacguaacaacaccaugcgaaauaaaagcaugcucacucacaugcuuaaaaucaaaaaacaugcuaacaacaguaaaagaccuaacaaugaaaacacucaaccccacccacgacauaauugccuuaugcgaauuugaaaacauaguaacauccaaaaaaguaauaauaccaacauaccuaagauccauuucaguaagaaacaaagaccuaaacacacuagaaaacauaacaacaacagaauuuaaaaacgcaauaacaaacgcaaaaauaauaccauacucaggauuacuacuuguaauaacaguaacagacaacaaaggagcauucaaauacauaaaaccucaaucacaauuuauaguagaccuaggagcauacuuagaaaaagaaucaaucuauuacgucacuacaaacuggaaacacacagcaaccagauucgcaauaaaacccauggaagacuaaggacuagugaagggaacacccaaauuuaauucagccuuaagcacaauuaauuaagagugaaacguaauuguacaagcaguuggucacccaccauagggcaugaucaacaccgcaaccuuuccuuuuucccccagugauucugaaaaaccccucuucccuucagcuugcuuagauguuccaaauuuaguaagcuuaaggcggccuacagaagaaaaagaaaaaaaaggccacaaaaguucccucucacuuucaguaaauaaaauaaaagcagcaacagaaauaaagaaauaaaugaaauucaaaaugaaauaaauauuguguugugcagcauuaaaaaaucaauaaaaauuaaaaaugagcaagaucuaaaaaaaaaaaaaaaaaaaaaaaaaaaaaaaaaaaaaaaaaaaaaaaaaaaaaaaaaaaaaaaaugcaucccccccccccccccccccccccccccccccaaaggcucuuuucagagccaccagaauu

SEQ ID NO: 19996 - RNA, 1440 nt, Artificial Sequence
  mRNA product Design d-3 comprising derived and/or modified sequence from HRSV(Memphis-37)__AIY60638.1__M (opt11)
gggagagggcgcuuggcuugcaaggacccugagcugcggcauugaagcacacccaacccaacucgacugaagucagccucacugaaccggaucugagaaucuucucucucugggcuugccagggcucuccgaaccuagcuagcauccucuucaauuccaacuagaaagcuuaccauggaaaccuacgucaacaaacuccacgaaggauccaccuacaccgccgccguccaauacaacguccuugaaaaagacgacgaccccgccucccucaccaucuggguccccauguuccaauccucaaugcccgccgaccuccuaaucaaagaacucgccaacgucaacauccucgucaaacaaaucuccacccccaaaggccccucccuccgagucaugaucaacucccgcuccgccguccucgcacaaaugcccuccaaauucaccaucugcgccaacguaucccucgacgaacgcuccaaacucgcauacgacguuaccacucccugcgaaaucaaagccugcucacucaccugccucaaauccaaaaacaugcucaccaccgucaaagaccucaccaugaaaacccuaaaccccacccacgacaucaucgcccucugcgaauuugaaaacauagucaccuccaaaaaaguaaucauccccaccuaccuccgcuccaucuccguccgcaacaaagaccucaacacacucgaaaacaucacaaccaccgaauuuaaaaacgccaucaccaacgccaaaaucaucccauacuccggccuccuccuagucaucaccgucaccgacaacaaaggcgccuucaaguacaucaaaccacaaucccaauucaucgucgaccucggcgccuaccucgaaaaagaauccaucuacuacguaaccaccaacuggaaacacaccgccacccgcuucgccaucaaacccauggaagacuaaggacuagugaagggaacacccaaauuuaauucagccuuaagcacaauuaauuaagagugaaacguaauuguacaagcaguuggucacccaccauagggcaugaucaacaccgcaaccuuuccuuuuucccccagugauucugaaaaaccccucuucccuucagcuugcuuagauguuccaaauuuaguaagcuuaaggcggccuacagaagaaaaagaaaaaaaaggccacaaaaguucccucucacuuucaguaaauaaaauaaaagcagcaacagaaauaaagaaauaaaugaaauucaaaaugaaauaaauauuguguugugcagcauuaaaaaaucaauaaaaauuaaaaaugagcaagaucuaaaaaaaaaaaaaaaaaaaaaaaaaaaaaaaaaaaaaaaaaaaaaaaaaaaaaaaaaaaaaaaaugcaucccccccccccccccccccccccccccccccaaaggcucuuuucagagccaccagaauu

SEQ ID NO: 19997 - RNA, 1123 nt, Artificial Sequence
  mRNA product Design d-4 comprising derived and/or modified sequence from HRSV(Memphis-37)__AIY60638.1__M (wt)
gggagagucccgcagucggcguccagcggcucugcuuguucgugugugugucguugcaggccuuauucaagcuuaccauggaaacauacgugaacaaacuucacgaaggcuccacauacacagcugcuguucaauacaauguccuagaaaaagacgaugacccugcaucacuuacaauaugggugcccauguuccaaucauccaugccagcagauuuacuuauaaaagaacuagcuaaugucaacauacuagugaaacaaauauccacacccaaaggaccuucauuaagagucaugauaaacucaagaagugcagugcuagcacaaaugcccagcaaauucacuauaugugccaauguguccuuggaugaaagaagcaagcuggcauaugauguaaccacacccugcgaaaucaaggcauguagucuaacaugccuaaaaucaaaaaauauguuaacuacaguuaaagaucucacuaugaaaacacucaacccaacacaugacaucauugcuuuaugugaauuugaaaauauaguaacaucaaaaaaagucauaauaccaacauacuuaagauccaucagugucagaaauaaagaucugaacacacuugaaaauauaacaaccaccgaauucaaaaaugccaucacaaaugcaaaaaucaucccuuacucaggauuacuguuagucaucacagugacugacaacaaaggagcauuuaaauacauaaagccacaaagucaauucauaguagaucuuggagcuuaccuagaaaaagaaaguauauauuauguuacaacaaauuggaagcacacagcuacacgauuugcaaucaaacccauggaagauuaaggacuaguggaagcauuuuccuggcugauuaaaagaaauuacucagcuauggucaucuguuccuguuagaaggcuaugcagcauauuauauacuaugcgcauguuaugaaaugcauaauaaaaaauuuuaaaaaaucuaaaagaucuaaaaaaaaaaaaaaaaaaaaaaaaaaaaaaaaaaaaaaaaaaaaaaaaaaaaaaaaaaaaaaaaugcaucccccccccccccccccccccccccccccccaaaggcucuuuucagagccaccagaauu

SEQ ID NO: 19998 - RNA, 1123 nt, Artificial Sequence; identical to SEQ ID NO: 9838
  mRNA product Design d-4 comprising derived and/or modified sequence from HRSV(Memphis-37)__AIY60638.1__M (opt1)

SEQ ID NO: 19999 - RNA, 1123 nt, Artificial Sequence; identical to SEQ ID NO: 9839
  mRNA product Design d-4 comprising derived and/or modified sequence from HRSV(Memphis-37)__AIY60638.1__M (opt2)

SEQ ID NO: 20000 - RNA, 1123 nt, Artificial Sequence; identical to SEQ ID NO: 9840
  mRNA product Design d-4 comprising derived and/or modified sequence from HRSV(Memphis-37)__AIY60638.1__M (opt3)

SEQ ID NO: 20001 - RNA, 1123 nt, Artificial Sequence; identical to SEQ ID NO: 9841
  mRNA product Design d-4 comprising derived and/or modified sequence from HRSV(Memphis-37)__AIY60638.1__M (opt4)

SEQ ID NO: 20002 - RNA, 1123 nt, Artificial Sequence; identical to SEQ ID NO: 9842
  mRNA product Design d-4 comprising derived and/or modified sequence from HRSV(Memphis-37)__AIY60638.1__M (opt5)

SEQ ID NO: 20003 - RNA, 1123 nt, Artificial Sequence
  mRNA product Design d-4 comprising derived and/or modified sequence from HRSV(Memphis-37)__AIY60638.1__M (opt6)
gggagagucccgcagucggcguccagcggcucugcuuguucgugugugugucguugcaggccuuauucaagcuuaccauggaaacauauguaaacaaauuacacgaaggauccacuuacacagccgcaguacaauacaauguacuagaaaaagacgacgacccagcaucacuaacaauauggguacccauguuccaauccucaaugccagcagaccuccuaauaaaagaacuagcuaauguaaacauacucguaaaacaaauauccacaccaaaaggaccaucacuacgaguaaugauaaacuccagauccgcaguacuagcacaaaugccaucaaaauucacaauaugcgccaacguaucacuagacgaaagaucaaaauuagcauacgacguaacaacaccaugcgaaauaaaagcaugcucacucacaugcuuaaaaucaaaaaacaugcuaacaacaguaaaagaccuaacaaugaaaacacucaaccccacccacgacauaauugccuuaugcgaauuugaaaacauaguaacauccaaaaaaguaauaauaccaacauaccuaagauccauuucaguaagaaacaaagaccuaaacacacuagaaaacauaacaacaacagaauuuaaaaacgcaauaacaaacgcaaaaauaauaccauacucaggauuacuacuuguaauaacaguaacagacaacaaaggagcauucaaauacauaaaaccucaaucacaauuuauaguagaccuaggagcauacuuagaaaaagaaucaaucuauuacgucacuacaaacuggaaacacacagcaaccagauucgcaauaaaacccauggaagacuaaggacuaguggaagcauuuuccuggcugauuaaaagaaauuacucagcuauggucaucuguuccuguuagaaggcuaugcagcauauuauauacuaugcgcauguuaugaaaugcauaauaaaaaauuuuaaaaaaucuaaaagaucuaaaaaaaaaaaaaaaaaaaaaaaaaaaaaaaaaaaaaaaaaaaaaaaaaaaaaaaaaaaaaaaaugcaucccccccccccccccccccccccccccccccaaaggcucuuuucagagccaccagaauu

SEQ ID NO: 20004 - RNA, 1123 nt, Artificial Sequence
  mRNA product Design d-4 comprising derived and/or modified sequence from HRSV(Memphis-37)__AIY60638.1__M (opt11)
gggagagucccgcagucggcguccagcggcucugcuuguucgugugugugucguugcaggccuuauucaagcuuaccauggaaaccuacgucaacaaacuccacgaaggauccaccuacaccgccgccguccaauacaacguccuugaaaaagacgacgaccccgccucccucaccaucuggguccccauguuccaauccucaaugcccgccgaccuccuaaucaaagaacucgccaacgucaacauccucgucaaacaaaucuccacccccaaaggccccucccuccgagucaugaucaacucccgcuccgccguccucgcacaaaugcccuccaaauucaccaucugcgccaacguaucccucgacgaacgcuccaaacucgcauacgacguuaccacucccugcgaaaucaaagccugcucacucaccugccucaaauccaaaaacaugcucaccaccgucaaagaccucaccaugaaaacccuaaaccccacccacgacaucaucgcccucugcgaauuugaaaacauagucaccuccaaaaaaguaaucauccccaccuaccuccgcuccaucuccguccgcaacaaagaccucaacacacucgaaaacaucacaaccaccgaauuuaaaaacgccaucaccaacgccaaaaucaucccauacuccggccuccuccuagucaucaccgucaccgacaacaaaggcgccuucaaguacaucaaaccacaaucccaauucaucgucgaccucggcgccuaccucgaaaaagaauccaucuacuacguaaccaccaacuggaaacacaccgccacccgcuucgccaucaaacccauggaagacuaaggacuaguggaagcauuuuccuggcugauuaaaagaaauuacucagcuauggucaucuguuccuguuagaaggcuaugcagcauauuauauacuaugcgcauguuaugaaaugcauaauaaaaaauuuuaaaaaaucuaaaagaucuaaaaaaaaaaaaaaaaaaaaaaaaaaaaaaaaaaaaaaaaaaaaaaaaaaaaaaaaaaaaaaaaugcaucccccccccccccccccccccccccccccccaaaggcucuuuucagagccaccagaauu

SEQ ID NO: 20005 - RNA, 1220 nt, Artificial Sequence
  mRNA product Design d-5 comprising derived and/or modified sequence from HRSV(Memphis-37)__AIY60638.1__M (wt)
gggagagggcgcuuggcuugcaaggacccugagcugcggcauugaagcacacccaacccaacucgacugaagucagccucacugaaccggaucugagaaucuucucucucugggcuugccagggcucuccgaaccuagcuagcauccucuucaauuccaacuagaaagcuuaccauggaaacauacgugaacaaacuucacgaaggcuccacauacacagcugcuguucaauacaauguccuagaaaaagacgaugacccugcaucacuuacaauaugggugcccauguuccaaucauccaugccagcagauuuacuuauaaaagaacuagcuaaugucaacauacuagugaaacaaauauccacacccaaaggaccuucauuaagagucaugauaaacucaagaagugcagugcuagcacaaaugcccagcaaauucacuauaugugccaauguguccuuggaugaaagaagcaagcuggcauaugauguaaccacacccugcgaaaucaaggcauguagucuaacaugccuaaaaucaaaaaauauguuaacuacaguuaaagaucucacuaugaaaacacucaacccaacacaugacaucauugcuuuaugugaauuugaaaauauaguaacaucaaaaaaagucauaauaccaacauacuuaagauccaucagugucagaaauaaagaucugaacacacuugaaaauauaacaaccaccgaauucaaaaaugccaucacaaaugcaaaaaucaucccuuacucaggauuacuguuagucaucacagugacugacaacaaaggagcauuuaaauacauaaagccacaaagucaauucauaguagaucuuggagcuuaccuagaaaaagaaaguauauauuauguuacaacaaauuggaagcacacagcuacacgauuugcaaucaaacccauggaagauuaaggacuaguggaagcauuuuccuggcugauuaaaagaaauuacucagcuauggucaucuguuccuguuagaaggcuaugcagcauauuauauacuaugcgcauguuaugaaaugcauaauaaaaaauuuuaaaaaaucuaaaagaucuaaaaaaaaaaaaaaaaaaaaaaaaaaaaaaaaaaaaaaaaaaaaaaaaaaaaaaaaaaaaaaaaugcaucccccccccccccccccccccccccccccccaaaggcucuuuucagagccaccagaauu

SEQ ID NO: 20006 - RNA, 1220 nt, Artificial Sequence; identical to SEQ ID NO: 9846
  mRNA product Design d-5 comprising derived and/or modified sequence from HRSV(Memphis-37)__AIY60638.1__M (opt1)

SEQ ID NO: 20007 - RNA, 1220 nt, Artificial Sequence; identical to SEQ ID NO: 9847
  mRNA product Design d-5 comprising derived and/or modified sequence from HRSV(Memphis-37)__AIY60638.1__M (opt2)

SEQ ID NO: 20008 - RNA, 1220 nt, Artificial Sequence; identical to SEQ ID NO: 9848
  mRNA product Design d-5 comprising derived and/or modified sequence from HRSV(Memphis-37)__AIY60638.1__M (opt3)

SEQ ID NO: 20009 - RNA, 1220 nt, Artificial Sequence; identical to SEQ ID NO: 9849
  mRNA product Design d-5 comprising derived and/or modified sequence from HRSV(Memphis-37)__AIY60638.1__M (opt4)

SEQ ID NO: 20010 - RNA, 1220 nt, Artificial Sequence; identical to SEQ ID NO: 9850
  mRNA product Design d-5 comprising derived and/or modified sequence from HRSV(Memphis-37)__AIY60638.1__M (opt5)

SEQ ID NO: 20011 - RNA, 1220 nt, Artificial Sequence
  mRNA product Design d-5 comprising derived and/or modified sequence from HRSV(Memphis-37)__AIY60638.1__M (opt6)
gggagagggcgcuuggcuugcaaggacccugagcugcggcauugaagcacacccaacccaacucgacugaagucagccucacugaaccggaucugagaaucuucucucucugggcuugccagggcucuccgaaccuagcuagcauccucuucaauuccaacuagaaagcuuaccauggaaacauauguaaacaaauuacacgaaggauccacuuacacagccgcaguacaauacaauguacuagaaaaagacgacgacccagcaucacuaacaauauggguacccauguuccaauccucaaugccagcagaccuccuaauaaaagaacuagcuaauguaaacauacucguaaaacaaauauccacaccaaaaggaccaucacuacgaguaaugauaaacuccagauccgcaguacuagcacaaaugccaucaaaauucacaauaugcgccaacguaucacuagacgaaagaucaaaauuagcauacgacguaacaacaccaugcgaaauaaaagcaugcucacucacaugcuuaaaaucaaaaaacaugcuaacaacaguaaaagaccuaacaaugaaaacacucaaccccacccacgacauaauugccuuaugcgaauuugaaaacauaguaacauccaaaaaaguaauaauaccaacauaccuaagauccauuucaguaagaaacaaagaccuaaacacacuagaaaacauaacaacaacagaauuuaaaaacgcaauaacaaacgcaaaaauaauaccauacucaggauuacuacuuguaauaacaguaacagacaacaaaggagcauucaaauacauaaaaccucaaucacaauuuauaguagaccuaggagcauacuuagaaaaagaaucaaucuauuacgucacuacaaacuggaaacacacagcaaccagauucgcaauaaaacccauggaagacuaaggacuaguggaagcauuuuccuggcugauuaaaagaaauuacucagcuauggucaucuguuccuguuagaaggcuaugcagcauauuauauacuaugcgcauguuaugaaaugcauaauaaaaaauuuuaaaaaaucuaaaagaucuaaaaaaaaaaaaaaaaaaaaaaaaaaaaaaaaaaaaaaaaaaaaaaaaaaaaaaaaaaaaaaaaugcaucccccccccccccccccccccccccccccccaaaggcucuuuucagagccaccagaauu

SEQ ID NO: 20012 - RNA, 1220 nt, Artificial Sequence
  mRNA product Design d-5 comprising derived and/or modified sequence from HRSV(Memphis-37)__AIY60638.1__M (opt11)
gggagagggcgcuuggcuugcaaggacccugagcugcggcauugaagcacacccaacccaacucgacugaagucagccucacugaaccggaucugagaaucuucucucucugggcuugccagggcucuccgaaccuagcuagcauccucuucaauuccaacuagaaagcuuaccauggaaaccuacgucaacaaacuccacgaaggauccaccuacaccgccgccguccaauacaacguccuugaaaaagacgacgaccccgccucccucaccaucuggguccccauguuccaauccucaaugcccgccgaccuccuaaucaaagaacucgccaacgucaacauccucgucaaacaaaucuccacccccaaaggccccucccuccgagucaugaucaacucccgcuccgccguccucgcacaaaugcccuccaaauucaccaucugcgccaacguaucccucgacgaacgcuccaaacucgcauacgacguuaccacucccugcgaaaucaaagccugcucacucaccugccucaaauccaaaaacaugcucaccaccgucaaagaccucaccaugaaaacccuaaaccccacccacgacaucaucgcccucugcgaauuugaaaacauagucaccuccaaaaaaguaaucauccccaccuaccuccgcuccaucuccguccgcaacaaagaccucaacacacucgaaaacaucacaaccaccgaauuuaaaaacgccaucaccaacgccaaaaucaucccauacuccggccuccuccuagucaucaccgucaccgacaacaaaggcgccuucaaguacaucaaaccacaaucccaauucaucgucgaccucggcgccuaccucgaaaaagaauccaucuacuacguaaccaccaacuggaaacacaccgccacccgcuucgccaucaaacccauggaagacuaaggacuaguggaagcauuuuccuggcugauuaaaagaaauuacucagcuauggucaucuguuccuguuagaaggcuaugcagcauauuauauacuaugcgcauguuaugaaaugcauaauaaaaaauuuuaaaaaaucuaaaagaucuaaaaaaaaaaaaaaaaaaaaaaaaaaaaaaaaaaaaaaaaaaaaaaaaaaaaaaaaaaaaaaaaugcaucccccccccccccccccccccccccccccccaaaggcucuuuucagagccaccagaauu

SEQ ID NO: 20013 - RNA, 1100 nt, Artificial Sequence
  mRNA product Design e-1 comprising derived and/or modified sequence from HRSV(Memphis-37)__AIY60638.1__M (wt)
gggagaauauaagcguuggcggagcgucgguuguagcacucugcgcgcccgcucuucugcugcuguuugucuacuuccuccugcuuccccgccgccgccgccgccaucaagcuuaccauggaaacauacgugaacaaacuucacgaaggcuccacauacacagcugcuguucaauacaauguccuagaaaaagacgaugacccugcaucacuuacaauaugggugcccauguuccaaucauccaugccagcagauuuacuuauaaaagaacuagcuaaugucaacauacuagugaaacaaauauccacacccaaaggaccuucauuaagagucaugauaaacucaagaagugcagugcuagcacaaaugcccagcaaauucacuauaugugccaauguguccuuggaugaaagaagcaagcuggcauaugauguaaccacacccugcgaaaucaaggcauguagucuaacaugccuaaaaucaaaaaauauguuaacuacaguuaaagaucucacuaugaaaacacucaacccaacacaugacaucauugcuuuaugugaauuugaaaauauaguaacaucaaaaaaagucauaauaccaacauacuuaagauccaucagugucagaaauaaagaucugaacacacuugaaaauauaacaaccaccgaauucaaaaaugccaucacaaaugcaaaaaucaucccuuacucaggauuacuguuagucaucacagugacugacaacaaaggagcauuuaaauacauaaagccacaaagucaauucauaguagaucuuggagcuuaccuagaaaaagaaaguauauauuauguuacaacaaauuggaagcacacagcuacacgauuugcaaucaaacccauggaagauuaaggacuaguguccaccugucccuccugggcugcuggauugucucguuuuccugccaaauaaacaggaucagcgcuuuacagaucuaaaaaaaaaaaaaaaaaaaaaaaaaaaaaaaaaaaaaaaaaaaaaaaaaaaaaaaaaaaaaaaaugcaucccccccccccccccccccccccccccccccaaaggcucuuuucagagccaccagaauu

SEQ ID NO: 20014 - RNA, 1100 nt, Artificial Sequence; identical to SEQ ID NO: 9854
  mRNA product Design e-1 comprising derived and/or modified sequence from HRSV(Memphis-37)__AIY60638.1__M (opt1)

SEQ ID NO: 20015 - RNA, 1100 nt, Artificial Sequence; identical to SEQ ID NO: 9855
  mRNA product Design e-1 comprising derived and/or modified sequence from HRSV(Memphis-37)__AIY60638.1__M (opt2)

SEQ ID NO: 20016 - RNA, 1100 nt, Artificial Sequence; identical to SEQ ID NO: 9856
  mRNA product Design e-1 comprising derived and/or modified sequence from HRSV(Memphis-37)__AIY60638.1__M (opt3)

SEQ ID NO: 20017 - RNA, 1100 nt, Artificial Sequence; identical to SEQ ID NO: 9857
  mRNA product Design e-1 comprising derived and/or modified sequence from HRSV(Memphis-37)__AIY60638.1__M (opt4)

SEQ ID NO: 20018 - RNA, 1100 nt, Artificial Sequence; identical to SEQ ID NO: 9858
  mRNA product Design e-1 comprising derived and/or modified sequence from HRSV(Memphis-37)__AIY60638.1__M (opt5)

SEQ ID NO: 20019 - RNA, 1100 nt, Artificial Sequence
  mRNA product Design e-1 comprising derived and/or modified sequence from HRSV(Memphis-37)__AIY60638.1__M (opt6)
gggagaauauaagcguuggcggagcgucgguuguagcacucugcgcgcccgcucuucugcugcuguuugucuacuuccuccugcuuccccgccgccgccgccgccaucaagcuuaccauggaaacauauguaaacaaauuacacgaaggauccacuuacacagccgcaguacaauacaauguacuagaaaaagacgacgacccagcaucacuaacaauauggguacccauguuccaauccucaaugccagcagaccuccuaauaaaagaacuagcuaauguaaacauacucguaaaacaaauauccacaccaaaaggaccaucacuacgaguaaugauaaacuccagauccgcaguacuagcacaaaugccaucaaaauucacaauaugcgccaacguaucacuagacgaaagaucaaaauuagcauacgacguaacaacaccaugcgaaauaaaagcaugcucacucacaugcuuaaaaucaaaaaacaugcuaacaacaguaaaagaccuaacaaugaaaacacucaaccccacccacgacauaauugccuuaugcgaauuugaaaacauaguaacauccaaaaaaguaauaauaccaacauaccuaagauccauuucaguaagaaacaaagaccuaaacacacuagaaaacauaacaacaacagaauuuaaaaacgcaauaacaaacgcaaaaauaauaccauacucaggauuacuacuuguaauaacaguaacagacaacaaaggagcauucaaauacauaaaaccucaaucacaauuuauaguagaccuaggagcauacuuagaaaaagaaucaaucuauuacgucacuacaaacuggaaacacacagcaaccagauucgcaauaaaacccauggaagacuaaggacuaguguccaccugucccuccugggcugcuggauugucucguuuuccugccaaauaaacaggaucagcgcuuuacagaucuaaaaaaaaaaaaaaaaaaaaaaaaaaaaaaaaaaaaaaaaaaaaaaaaaaaaaaaaaaaaaaaaugcaucccccccccccccccccccccccccccccccaaaggcucuuuucagagccaccagaauu

SEQ ID NO: 20020 - RNA, 1100 nt, Artificial Sequence
  mRNA product Design e-1 comprising derived and/or modified sequence from HRSV(Memphis-37)__AIY60638.1__M (opt11)
gggagaauauaagcguuggcggagcgucgguuguagcacucugcgcgcccgcucuucugcugcuguuugucuacuuccuccugcuuccccgccgccgccgccgccaucaagcuuaccauggaaaccuacgucaacaaacuccacgaaggauccaccuacaccgccgccguccaauacaacguccuugaaaaagacgacgaccccgccucccucaccaucuggguccccauguuccaauccucaaugcccgccgaccuccuaaucaaagaacucgccaacgucaacauccucgucaaacaaaucuccacccccaaaggccccucccuccgagucaugaucaacucccgcuccgccguccucgcacaaaugcccuccaaauucaccaucugcgccaacguaucccucgacgaacgcuccaaacucgcauacgacguuaccacucccugcgaaaucaaagccugcucacucaccugccucaaauccaaaaacaugcucaccaccgucaaagaccucaccaugaaaacccuaaaccccacccacgacaucaucgcccucugcgaauuugaaaacauagucaccuccaaaaaaguaaucauccccaccuaccuccgcuccaucuccguccgcaacaaagaccucaacacacucgaaaacaucacaaccaccgaauuuaaaaacgccaucaccaacgccaaaaucaucccauacuccggccuccuccuagucaucaccgucaccgacaacaaaggcgccuucaaguacaucaaaccacaaucccaauucaucgucgaccucggcgccuaccucgaaaaagaauccaucuacuacguaaccaccaacuggaaacacaccgccacccgcuucgccaucaaacccauggaagacuaaggacuaguguccaccugucccuccugggcugcuggauugucucguuuuccugccaaauaaacaggaucagcgcuuuacagaucuaaaaaaaaaaaaaaaaaaaaaaaaaaaaaaaaaaaaaaaaaaaaaaaaaaaaaaaaaaaaaaaaugcaucccccccccccccccccccccccccccccccaaaggcucuuuucagagccaccagaauu

SEQ ID NO: 20021 - RNA, 1082 nt, Artificial Sequence
  mRNA product Design e-2 comprising derived and/or modified sequence from HRSV(Memphis-37)__AIY60638.1__M (wt)
gggagacccgugacccggaaguuguacggcuacgcgacuuucccucccacaaacccucgcgcccuuccuuuccuacuugggcccggcagaaagcuuaccauggaaacauacgugaacaaacuucacgaaggcuccacauacacagcugcuguucaauacaauguccuagaaaaagacgaugacccugcaucacuuacaauaugggugcccauguuccaaucauccaugccagcagauuuacuuauaaaagaacuagcuaaugucaacauacuagugaaacaaauauccacacccaaaggaccuucauuaagagucaugauaaacucaagaagugcagugcuagcacaaaugcccagcaaauucacuauaugugccaauguguccuuggaugaaagaagcaagcuggcauaugauguaaccacacccugcgaaaucaaggcauguagucuaacaugccuaaaaucaaaaaauauguuaacuacaguuaaagaucucacuaugaaaacacucaacccaacacaugacaucauugcuuuaugugaauuugaaaauauaguaacaucaaaaaaagucauaauaccaacauacuuaagauccaucagugucagaaauaaagaucugaacacacuugaaaauauaacaaccaccgaauucaaaaaugccaucacaaaugcaaaaaucaucccuuacucaggauuacuguuagucaucacagugacugacaacaaaggagcauuuaaauacauaaagccacaaagucaauucauaguagaucuuggagcuuaccuagaaaaagaaaguauauauuauguuacaacaaauuggaagcacacagcuacacgauuugcaaucaaacccauggaagauuaaggacuaguguccaccugucccuccugggcugcuggauugucucguuuuccugccaaauaaacaggaucagcgcuuuacagaucuaaaaaaaaaaaaaaaaaaaaaaaaaaaaaaaaaaaaaaaaaaaaaaaaaaaaaaaaaaaaaaaaugcaucccccccccccccccccccccccccccccccaaaggcucuuuucagagccaccagaauu

SEQ ID NO: 20022 - RNA, 1082 nt, Artificial Sequence; identical to SEQ ID NO: 9862
  mRNA product Design e-2 comprising derived and/or modified sequence from HRSV(Memphis-37)__AIY60638.1__M (opt1)

SEQ ID NO: 20023 - RNA, 1082 nt, Artificial Sequence; identical to SEQ ID NO: 9863
  mRNA product Design e-2 comprising derived and/or modified sequence from HRSV(Memphis-37)__AIY60638.1__M (opt2)

SEQ ID NO: 20024 - RNA, 1082 nt, Artificial Sequence; identical to SEQ ID NO: 9864
  mRNA product Design e-2 comprising derived and/or modified sequence from HRSV(Memphis-37)__AIY60638.1__M (opt3)

SEQ ID NO: 20025 - RNA, 1082 nt, Artificial Sequence; identical to SEQ ID NO: 9865
  mRNA product Design e-2 comprising derived and/or modified sequence from HRSV(Memphis-37)__AIY60638.1__M (opt4)

SEQ ID NO: 20026 - RNA, 1082 nt, Artificial Sequence; identical to SEQ ID NO: 9866
  mRNA product Design e-2 comprising derived and/or modified sequence from HRSV(Memphis-37)__AIY60638.1__M (opt5)

SEQ ID NO: 20027 - RNA, 1082 nt, Artificial Sequence
  mRNA product Design e-2 comprising derived and/or modified sequence from HRSV(Memphis-37)__AIY60638.1__M (opt6)
gggagacccgugacccggaaguuguacggcuacgcgacuuucccucccacaaacccucgcgcccuuccuuuccuacuugggcccggcagaaagcuuaccauggaaacauauguaaacaaauuacacgaaggauccacuuacacagccgcaguacaauacaauguacuagaaaaagacgacgacccagcaucacuaacaauauggguacccauguuccaauccucaaugccagcagaccuccuaauaaaagaacuagcuaauguaaacauacucguaaaacaaauauccacaccaaaaggaccaucacuacgaguaaugauaaacuccagauccgcaguacuagcacaaaugccaucaaaauucacaauaugcgccaacguaucacuagacgaaagaucaaaauuagcauacgacguaacaacaccaugcgaaauaaaagcaugcucacucacaugcuuaaaaucaaaaaacaugcuaacaacaguaaaagaccuaacaaugaaaacacucaaccccacccacgacauaauugccuuaugcgaauuugaaaacauaguaacauccaaaaaaguaauaauaccaacauaccuaagauccauuucaguaagaaacaaagaccuaaacacacuagaaaacauaacaacaacagaauuuaaaaacgcaauaacaaacgcaaaaauaauaccauacucaggauuacuacuuguaauaacaguaacagacaacaaaggagcauucaaauacauaaaaccucaaucacaauuuauaguagaccuaggagcauacuuagaaaaagaaucaaucuauuacgucacuacaaacuggaaacacacagcaaccagauucgcaauaaaacccauggaagacuaaggacuaguguccaccugucccuccugggcugcuggauugucucguuuuccugccaaauaaacaggaucagcgcuuuacagaucuaaaaaaaaaaaaaaaaaaaaaaaaaaaaaaaaaaaaaaaaaaaaaaaaaaaaaaaaaaaaaaaaugcaucccccccccccccccccccccccccccccccaaaggcucuuuucagagccaccagaauu

SEQ ID NO: 20028 - RNA, 1082 nt, Artificial Sequence
  mRNA product Design e-2 comprising derived and/or modified sequence from HRSV(Memphis-37)__AIY60638.1__M (opt11)
gggagacccgugacccggaaguuguacggcuacgcgacuuucccucccacaaacccucgcgcccuuccuuuccuacuugggcccggcagaaagcuuaccauggaaaccuacgucaacaaacuccacgaaggauccaccuacaccgccgccguccaauacaacguccuugaaaaagacgacgaccccgccucccucaccaucuggguccccauguuccaauccucaaugcccgccgaccuccuaaucaaagaacucgccaacgucaacauccucgucaaacaaaucuccacccccaaaggccccucccuccgagucaugaucaacucccgcuccgccguccucgcacaaaugcccuccaaauucaccaucugcgccaacguaucccucgacgaacgcuccaaacucgcauacgacguuaccacucccugcgaaaucaaagccugcucacucaccugccucaaauccaaaaacaugcucaccaccgucaaagaccucaccaugaaaacccuaaaccccacccacgacaucaucgcccucugcgaauuugaaaacauagucaccuccaaaaaaguaaucauccccaccuaccuccgcuccaucuccguccgcaacaaagaccucaacacacucgaaaacaucacaaccaccgaauuuaaaaacgccaucaccaacgccaaaaucaucccauacuccggccuccuccuagucaucaccgucaccgacaacaaaggcgccuucaaguacaucaaaccacaaucccaauucaucgucgaccucggcgccuaccucgaaaaagaauccaucuacuacguaaccaccaacuggaaacacaccgccacccgcuucgccaucaaacccauggaagacuaaggacuaguguccaccugucccuccugggcugcuggauugucucguuuuccugccaaauaaacaggaucagcgcuuuacagaucuaaaaaaaaaaaaaaaaaaaaaaaaaaaaaaaaaaaaaaaaaaaaaaaaaaaaaaaaaaaaaaaaugcaucccccccccccccccccccccccccccccccaaaggcucuuuucagagccaccagaauu

SEQ ID NO: 20029 - RNA, 1052 nt, Artificial Sequence
  mRNA product Design e-3 comprising derived and/or modified sequence from HRSV(Memphis-37)__AIY60638.1__M (wt)
gggagacuuucccauucuguagcagaauuugguguugccuguggucuuggucccgcggagaagcuuaccauggaaacauacgugaacaaacuucacgaaggcuccacauacacagcugcuguucaauacaauguccuagaaaaagacgaugacccugcaucacuuacaauaugggugcccauguuccaaucauccaugccagcagauuuacuuauaaaagaacuagcuaaugucaacauacuagugaaacaaauauccacacccaaaggaccuucauuaagagucaugauaaacucaagaagugcagugcuagcacaaaugcccagcaaauucacuauaugugccaauguguccuuggaugaaagaagcaagcuggcauaugauguaaccacacccugcgaaaucaaggcauguagucuaacaugccuaaaaucaaaaaauauguuaacuacaguuaaagaucucacuaugaaaacacucaacccaacacaugacaucauugcuuuaugugaauuugaaaauauaguaacaucaaaaaaagucauaauaccaacauacuuaagauccaucagugucagaaauaaagaucugaacacacuugaaaauauaacaaccaccgaauucaaaaaugccaucacaaaugcaaaaaucaucccuuacucaggauuacuguuagucaucacagugacugacaacaaaggagcauuuaaauacauaaagccacaaagucaauucauaguagaucuuggagcuuaccuagaaaaagaaaguauauauuauguuacaacaaauuggaagcacacagcuacacgauuugcaaucaaacccauggaagauuaaggacuaguguccaccugucccuccugggcugcuggauugucucguuuuccugccaaauaaacaggaucagcgcuuuacagaucuaaaaaaaaaaaaaaaaaaaaaaaaaaaaaaaaaaaaaaaaaaaaaaaaaaaaaaaaaaaaaaaaugcaucccccccccccccccccccccccccccccccaaaggcucuuuucagagccaccagaauu

SEQ ID NO: 20030 - RNA, 1052 nt, Artificial Sequence; identical to SEQ ID NO: 9870
  mRNA product Design e-3 comprising derived and/or modified sequence from HRSV(Memphis-37)__AIY60638.1__M (opt1)

SEQ ID NO: 20031 - RNA, 1052 nt, Artificial Sequence; identical to SEQ ID NO: 9871
  mRNA product Design e-3 comprising derived and/or modified sequence from HRSV(Memphis-37)__AIY60638.1__M (opt2)

SEQ ID NO: 20032 - RNA, 1052 nt, Artificial Sequence; identical to SEQ ID NO: 9872
  mRNA product Design e-3 comprising derived and/or modified sequence from HRSV(Memphis-37)__AIY60638.1__M (opt3)

SEQ ID NO: 20033 - RNA, 1052 nt, Artificial Sequence; identical to SEQ ID NO: 9873
  mRNA product Design e-3 comprising derived and/or modified sequence from HRSV(Memphis-37)__AIY60638.1__M (opt4)

SEQ ID NO: 20034 - RNA, 1052 nt, Artificial Sequence; identical to SEQ ID NO: 9874
  mRNA product Design e-3 comprising derived and/or modified sequence from HRSV(Memphis-37)__AIY60638.1__M (opt5)

SEQ ID NO: 20035 - RNA, 1052 nt, Artificial Sequence
  mRNA product Design e-3 comprising derived and/or modified sequence from HRSV(Memphis-37)__AIY60638.1__M (opt6)
gggagacuuucccauucuguagcagaauuugguguugccuguggucuuggucccgcggagaagcuuaccauggaaacauauguaaacaaauuacacgaaggauccacuuacacagccgcaguacaauacaauguacuagaaaaagacgacgacccagcaucacuaacaauauggguacccauguuccaauccucaaugccagcagaccuccuaauaaaagaacuagcuaauguaaacauacucguaaaacaaauauccacaccaaaaggaccaucacuacgaguaaugauaaacuccagauccgcaguacuagcacaaaugccaucaaaauucacaauaugcgccaacguaucacuagacgaaagaucaaaauuagcauacgacguaacaacaccaugcgaaauaaaagcaugcucacucacaugcuuaaaaucaaaaaacaugcuaacaacaguaaaagaccuaacaaugaaaacacucaaccccacccacgacauaauugccuuaugcgaauuugaaaacauaguaacauccaaaaaaguaauaauaccaacauaccuaagauccauuucaguaagaaacaaagaccuaaacacacuagaaaacauaacaacaacagaauuuaaaaacgcaauaacaaacgcaaaaauaauaccauacucaggauuacuacuuguaauaacaguaacagacaacaaaggagcauucaaauacauaaaaccucaaucacaauuuauaguagaccuaggagcauacuuagaaaaagaaucaaucuauuacgucacuacaaacuggaaacacacagcaaccagauucgcaauaaaacccauggaagacuaaggacuaguguccaccugucccuccugggcugcuggauugucucguuuuccugccaaauaaacaggaucagcgcuuuacagaucuaaaaaaaaaaaaaaaaaaaaaaaaaaaaaaaaaaaaaaaaaaaaaaaaaaaaaaaaaaaaaaaaugcaucccccccccccccccccccccccccccccccaaaggcucuuuucagagccaccagaauu

SEQ ID NO: 20036 - RNA, 1052 nt, Artificial Sequence
  mRNA product Design e-3 comprising derived and/or modified sequence from HRSV(Memphis-37)__AIY60638.1__M (opt11)
gggagacuuucccauucuguagcagaauuugguguugccuguggucuuggucccgcggagaagcuuaccauggaaaccuacgucaacaaacuccacgaaggauccaccuacaccgccgccguccaauacaacguccuugaaaaagacgacgaccccgccucccucaccaucuggguccccauguuccaauccucaaugcccgccgaccuccuaaucaaagaacucgccaacgucaacauccucgucaaacaaaucuccacccccaaaggccccucccuccgagucaugaucaacucccgcuccgccguccucgcacaaaugcccuccaaauucaccaucugcgccaacguaucccucgacgaacgcuccaaacucgcauacgacguuaccacucccugcgaaaucaaagccugcucacucaccugccucaaauccaaaaacaugcucaccaccgucaaagaccucaccaugaaaacccuaaaccccacccacgacaucaucgcccucugcgaauuugaaaacauagucaccuccaaaaaaguaaucauccccaccuaccuccgcuccaucuccguccgcaacaaagaccucaacacacucgaaaacaucacaaccaccgaauuuaaaaacgccaucaccaacgccaaaaucaucccauacuccggccuccuccuagucaucaccgucaccgacaacaaaggcgccuucaaguacaucaaaccacaaucccaauucaucgucgaccucggcgccuaccucgaaaaagaauccaucuacuacguaaccaccaacuggaaacacaccgccacccgcuucgccaucaaacccauggaagacuaaggacuaguguccaccugucccuccugggcugcuggauugucucguuuuccugccaaauaaacaggaucagcgcuuuacagaucuaaaaaaaaaaaaaaaaaaaaaaaaaaaaaaaaaaaaaaaaaaaaaaaaaaaaaaaaaaaaaaaaugcaucccccccccccccccccccccccccccccccaaaggcucuuuucagagccaccagaauu

SEQ ID NO: 20037 - RNA, 1106 nt, Artificial Sequence
  mRNA product Design e-4 comprising derived and/or modified sequence from HRSV(Memphis-37)__AIY60638.1__M (wt)
gggagacuccugucgggcggaaguaggaggaguagaguuuaaaaacaguacucuuuuuccgguucgggacguaguugaagcaacgacaagccggauaaccgcucuugagacaggaagcuuaccauggaaacauacgugaacaaacuucacgaaggcuccacauacacagcugcuguucaauacaauguccuagaaaaagacgaugacccugcaucacuuacaauaugggugcccauguuccaaucauccaugccagcagauuuacuuauaaaagaacuagcuaaugucaacauacuagugaaacaaauauccacacccaaaggaccuucauuaagagucaugauaaacucaagaagugcagugcuagcacaaaugcccagcaaauucacuauaugugccaauguguccuuggaugaaagaagcaagcuggcauaugauguaaccacacccugcgaaaucaaggcauguagucuaacaugccuaaaaucaaaaaauauguuaacuacaguuaaagaucucacuaugaaaacacucaacccaacacaugacaucauugcuuuaugugaauuugaaaauauaguaacaucaaaaaaagucauaauaccaacauacuuaagauccaucagugucagaaauaaagaucugaacacacuugaaaauauaacaaccaccgaauucaaaaaugccaucacaaaugcaaaaaucaucccuuacucaggauuacuguuagucaucacagugacugacaacaaaggagcauuuaaauacauaaagccacaaagucaauucauaguagaucuuggagcuuaccuagaaaaagaaaguauauauuauguuacaacaaauuggaagcacacagcuacacgauuugcaaucaaacccauggaagauuaaggacuaguguccaccugucccuccugggcugcuggauugucucguuuuccugccaaauaaacaggaucagcgcuuuacagaucuaaaaaaaaaaaaaaaaaaaaaaaaaaaaaaaaaaaaaaaaaaaaaaaaaaaaaaaaaaaaaaaaugcaucccccccccccccccccccccccccccccccaaaggcucuuuucagagccaccagaauu

SEQ ID NO: 20038 - RNA, 1106 nt, Artificial Sequence; identical to SEQ ID NO: 9878
  mRNA product Design e-4 comprising derived and/or modified sequence from HRSV(Memphis-37)__AIY60638.1__M (opt1)

SEQ ID NO: 20039 - RNA, 1106 nt, Artificial Sequence; identical to SEQ ID NO: 9879
  mRNA product Design e-4 comprising derived and/or modified sequence from HRSV(Memphis-37)__AIY60638.1__M (opt2)

SEQ ID NO: 20040 - RNA, 1106 nt, Artificial Sequence; identical to SEQ ID NO: 9880
  mRNA product Design e-4 comprising derived and/or modified sequence from HRSV(Memphis-37)__AIY60638.1__M (opt3)

SEQ ID NO: 20041 - RNA, 1106 nt, Artificial Sequence; identical to SEQ ID NO: 9881
  mRNA product Design e-4 comprising derived and/or modified sequence from HRSV(Memphis-37)__AIY60638.1__M (opt4)

SEQ ID NO: 20042 - RNA, 1106 nt, Artificial Sequence; identical to SEQ ID NO: 9882
  mRNA product Design e-4 comprising derived and/or modified sequence from HRSV(Memphis-37)__AIY60638.1__M (opt5)

SEQ ID NO: 20043 - RNA, 1106 nt, Artificial Sequence
  mRNA product Design e-4 comprising derived and/or modified sequence from HRSV(Memphis-37)__AIY60638.1__M (opt6)
gggagacuccugucgggcggaaguaggaggaguagaguuuaaaaacaguacucuuuuuccgguucgggacguaguugaagcaacgacaagccggauaaccgcucuugagacaggaagcuuaccauggaaacauauguaaacaaauuacacgaaggauccacuuacacagccgcaguacaauacaauguacuagaaaaagacgacgacccagcaucacuaacaauauggguacccauguuccaauccucaaugccagcagaccuccuaauaaaagaacuagcuaauguaaacauacucguaaaacaaauauccacaccaaaaggaccaucacuacgaguaaugauaaacuccagauccgcaguacuagcacaaaugccaucaaaauucacaauaugcgccaacguaucacuagacgaaagaucaaaauuagcauacgacguaacaacaccaugcgaaauaaaagcaugcucacucacaugcuuaaaaucaaaaaacaugcuaacaacaguaaaagaccuaacaaugaaaacacucaaccccacccacgacauaauugccuuaugcgaauuugaaaacauaguaacauccaaaaaaguaauaauaccaacauaccuaagauccauuucaguaagaaacaaagaccuaaacacacuagaaaacauaacaacaacagaauuuaaaaacgcaauaacaaacgcaaaaauaauaccauacucaggauuacuacuuguaauaacaguaacagacaacaaaggagcauucaaauacauaaaaccucaaucacaauuuauaguagaccuaggagcauacuuagaaaaagaaucaaucuauuacgucacuacaaacuggaaacacacagcaaccagauucgcaauaaaacccauggaagacuaaggacuaguguccaccugucccuccugggcugcuggauugucucguuuuccugccaaauaaacaggaucagcgcuuuacagaucuaaaaaaaaaaaaaaaaaaaaaaaaaaaaaaaaaaaaaaaaaaaaaaaaaaaaaaaaaaaaaaaaugcaucccccccccccccccccccccccccccccccaaaggcucuuuucagagccaccagaauu

SEQ ID NO: 20044 - RNA, 1106 nt, Artificial Sequence
  mRNA product Design e-4 comprising derived and/or modified sequence from HRSV(Memphis-37)__AIY60638.1__M (opt11)
gggagacuccugucgggcggaaguaggaggaguagaguuuaaaaacaguacucuuuuuccgguucgggacguaguugaagcaacgacaagccggauaaccgcucuugagacaggaagcuuaccauggaaaccuacgucaacaaacuccacgaaggauccaccuacaccgccgccguccaauacaacguccuugaaaaagacgacgaccccgccucccucaccaucuggguccccauguuccaauccucaaugcccgccgaccuccuaaucaaagaacucgccaacgucaacauccucgucaaacaaaucuccacccccaaaggccccucccuccgagucaugaucaacucccgcuccgccguccucgcacaaaugcccuccaaauucaccaucugcgccaacguaucccucgacgaacgcuccaaacucgcauacgacguuaccacucccugcgaaaucaaagccugcucacucaccugccucaaauccaaaaacaugcucaccaccgucaaagaccucaccaugaaaacccuaaaccccacccacgacaucaucgcccucugcgaauuugaaaacauagucaccuccaaaaaaguaaucauccccaccuaccuccgcuccaucuccguccgcaacaaagaccucaacacacucgaaaacaucacaaccaccgaauuuaaaaacgccaucaccaacgccaaaaucaucccauacuccggccuccuccuagucaucaccgucaccgacaacaaaggcgccuucaaguacaucaaaccacaaucccaauucaucgucgaccucggcgccuaccucgaaaaagaauccaucuacuacguaaccaccaacuggaaacacaccgccacccgcuucgccaucaaacccauggaagacuaaggacuaguguccaccugucccuccugggcugcuggauugucucguuuuccugccaaauaaacaggaucagcgcuuuacagaucuaaaaaaaaaaaaaaaaaaaaaaaaaaaaaaaaaaaaaaaaaaaaaaaaaaaaaaaaaaaaaaaaugcaucccccccccccccccccccccccccccccccaaaggcucuuuucagagccaccagaauu

SEQ ID NO: 20045 - RNA, 1073 nt, Artificial Sequence
  mRNA product Design e-5 comprising derived and/or modified sequence from HRSV(Memphis-37)__AIY60638.1__M (wt)
gggagagcggcucggccauuuugucccagucaguccggaggcugcggcugcagaaguaccgccugcggaguaacugcaaagaagcuuaccauggaaacauacgugaacaaacuucacgaaggcuccacauacacagcugcuguucaauacaauguccuagaaaaagacgaugacccugcaucacuuacaauaugggugcccauguuccaaucauccaugccagcagauuuacuuauaaaagaacuagcuaaugucaacauacuagugaaacaaauauccacacccaaaggaccuucauuaagagucaugauaaacucaagaagugcagugcuagcacaaaugcccagcaaauucacuauaugugccaauguguccuuggaugaaagaagcaagcuggcauaugauguaaccacacccugcgaaaucaaggcauguagucuaacaugccuaaaaucaaaaaauauguuaacuacaguuaaagaucucacuaugaaaacacucaacccaacacaugacaucauugcuuuaugugaauuugaaaauauaguaacaucaaaaaaagucauaauaccaacauacuuaagauccaucagugucagaaauaaagaucugaacacacuugaaaauauaacaaccaccgaauucaaaaaugccaucacaaaugcaaaaaucaucccuuacucaggauuacuguuagucaucacagugacugacaacaaaggagcauuuaaauacauaaagccacaaagucaauucauaguagaucuuggagcuuaccuagaaaaagaaaguauauauuauguuacaacaaauuggaagcacacagcuacacgauuugcaaucaaacccauggaagauuaaggacuaguguccaccugucccuccugggcugcuggauugucucguuuuccugccaaauaaacaggaucagcgcuuuacagaucuaaaaaaaaaaaaaaaaaaaaaaaaaaaaaaaaaaaaaaaaaaaaaaaaaaaaaaaaaaaaaaaaugcaucccccccccccccccccccccccccccccccaaaggcucuuuucagagccaccagaauu

SEQ ID NO: 20046 - RNA, 1073 nt, Artificial Sequence; identical to SEQ ID NO: 9886
  mRNA product Design e-5 comprising derived and/or modified sequence from HRSV(Memphis-37)__AIY60638.1__M (opt1)

SEQ ID NO: 20047 - RNA, 1073 nt, Artificial Sequence; identical to SEQ ID NO: 9887
  mRNA product Design e-5 comprising derived and/or modified sequence from HRSV(Memphis-37)__AIY60638.1__M (opt2)

SEQ ID NO: 20048 - RNA, 1073 nt, Artificial Sequence; identical to SEQ ID NO: 9888
  mRNA product Design e-5 comprising derived and/or modified sequence from HRSV(Memphis-37)__AIY60638.1__M (opt3)

SEQ ID NO: 20049 - RNA, 1073 nt, Artificial Sequence; identical to SEQ ID NO: 9889
  mRNA product Design e-5 comprising derived and/or modified sequence from HRSV(Memphis-37)__AIY60638.1__M (opt4)

SEQ ID NO: 20050 - RNA, 1073 nt, Artificial Sequence; identical to SEQ ID NO: 9890
  mRNA product Design e-5 comprising derived and/or modified sequence from HRSV(Memphis-37)__AIY60638.1__M (opt5)

SEQ ID NO: 20051 - RNA, 1073 nt, Artificial Sequence
  mRNA product Design e-5 comprising derived and/or modified sequence from HRSV(Memphis-37)__AIY60638.1__M (opt6)
gggagagcggcucggccauuuugucccagucaguccggaggcugcggcugcagaaguaccgccugcggaguaacugcaaagaagcuuaccauggaaacauauguaaacaaauuacacgaaggauccacuuacacagccgcaguacaauacaauguacuagaaaaagacgacgacccagcaucacuaacaauauggguacccauguuccaauccucaaugccagcagaccuccuaauaaaagaacuagcuaauguaaacauacucguaaaacaaauauccacaccaaaaggaccaucacuacgaguaaugauaaacuccagauccgcaguacuagcacaaaugccaucaaaauucacaauaugcgccaacguaucacuagacgaaagaucaaaauuagcauacgacguaacaacaccaugcgaaauaaaagcaugcucacucacaugcuuaaaaucaaaaaacaugcuaacaacaguaaaagaccuaacaaugaaaacacucaaccccacccacgacauaauugccuuaugcgaauuugaaaacauaguaacauccaaaaaaguaauaauaccaacauaccuaagauccauuucaguaagaaacaaagaccuaaacacacuagaaaacauaacaacaacagaauuuaaaaacgcaauaacaaacgcaaaaauaauaccauacucaggauuacuacuuguaauaacaguaacagacaacaaaggagcauucaaauacauaaaaccucaaucacaauuuauaguagaccuaggagcauacuuagaaaaagaaucaaucuauuacgucacuacaaacuggaaacacacagcaaccagauucgcaauaaaacccauggaagacuaaggacuaguguccaccugucccuccugggcugcuggauugucucguuuuccugccaaauaaacaggaucagcgcuuuacagaucuaaaaaaaaaaaaaaaaaaaaaaaaaaaaaaaaaaaaaaaaaaaaaaaaaaaaaaaaaaaaaaaaugcaucccccccccccccccccccccccccccccccaaaggcucuuuucagagccaccagaauu

SEQ ID NO: 20052 - RNA, 1073 nt, Artificial Sequence
  mRNA product Design e-5 comprising derived and/or modified sequence from HRSV(Memphis-37)__AIY60638.1__M (opt11)
gggagagcggcucggccauuuugucccagucaguccggaggcugcggcugcagaaguaccgccugcggaguaacugcaaagaagcuuaccauggaaaccuacgucaacaaacuccacgaaggauccaccuacaccgccgccguccaauacaacguccuugaaaaagacgacgaccccgccucccucaccaucuggguccccauguuccaauccucaaugcccgccgaccuccuaaucaaagaacucgccaacgucaacauccucgucaaacaaaucuccacccccaaaggccccucccuccgagucaugaucaacucccgcuccgccguccucgcacaaaugcccuccaaauucaccaucugcgccaacguaucccucgacgaacgcuccaaacucgcauacgacguuaccacucccugcgaaaucaaagccugcucacucaccugccucaaauccaaaaacaugcucaccaccgucaaagaccucaccaugaaaacccuaaaccccacccacgacaucaucgcccucugcgaauuugaaaacauagucaccuccaaaaaaguaaucauccccaccuaccuccgcuccaucuccguccgcaacaaagaccucaacacacucgaaaacaucacaaccaccgaauuuaaaaacgccaucaccaacgccaaaaucaucccauacuccggccuccuccuagucaucaccgucaccgacaacaaaggcgccuucaaguacaucaaaccacaaucccaauucaucgucgaccucggcgccuaccucgaaaaagaauccaucuacuacguaaccaccaacuggaaacacaccgccacccgcuucgccaucaaacccauggaagacuaaggacuaguguccaccugucccuccugggcugcuggauugucucguuuuccugccaaauaaacaggaucagcgcuuuacagaucuaaaaaaaaaaaaaaaaaaaaaaaaaaaaaaaaaaaaaaaaaaaaaaaaaaaaaaaaaaaaaaaaugcaucccccccccccccccccccccccccccccccaaaggcucuuuucagagccaccagaauu

SEQ ID NO: 20053 - RNA, 1140 nt, Artificial Sequence
  mRNA product Design e-6 comprising derived and/or modified sequence from HRSV(Memphis-37)__AIY60638.1__M (wt)
gggagagcggcucggccauuuugucccagucaguccggaggcugcggcugcagaaguaccgccugcggaguaacugcaaagaagcuuaccauggaaacauacgugaacaaacuucacgaaggcuccacauacacagcugcuguucaauacaauguccuagaaaaagacgaugacccugcaucacuuacaauaugggugcccauguuccaaucauccaugccagcagauuuacuuauaaaagaacuagcuaaugucaacauacuagugaaacaaauauccacacccaaaggaccuucauuaagagucaugauaaacucaagaagugcagugcuagcacaaaugcccagcaaauucacuauaugugccaauguguccuuggaugaaagaagcaagcuggcauaugauguaaccacacccugcgaaaucaaggcauguagucuaacaugccuaaaaucaaaaaauauguuaacuacaguuaaagaucucacuaugaaaacacucaacccaacacaugacaucauugcuuuaugugaauuugaaaauauaguaacaucaaaaaaagucauaauaccaacauacuuaagauccaucagugucagaaauaaagaucugaacacacuugaaaauauaacaaccaccgaauucaaaaaugccaucacaaaugcaaaaaucaucccuuacucaggauuacuguuagucaucacagugacugacaacaaaggagcauuuaaauacauaaagccacaaagucaauucauaguagaucuuggagcuuaccuagaaaaagaaaguauauauuauguuacaacaaauuggaagcacacagcuacacgauuugcaaucaaacccauggaagauuaaggacuaguacuggcugcaucucccuuuccucuguccuccauccuucucccaggauggugaagggggaccugguacccagugauccccaccccaggauccuaaaucaugacuuaccugcuaauaaaaacucauuggaaaagugagaagaucuaaaaaaaaaaaaaaaaaaaaaaaaaaaaaaaaaaaaaaaaaaaaaaaaaaaaaaaaaaaaaaaaugcaucccccccccccccccccccccccccccccccaaaggcucuuuucagagccaccagaauu

SEQ ID NO: 20054 - RNA, 1140 nt, Artificial Sequence; identical to SEQ ID NO: 9894
  mRNA product Design e-6 comprising derived and/or modified sequence from HRSV(Memphis-37)__AIY60638.1__M (opt1)

SEQ ID NO: 20055 - RNA, 1140 nt, Artificial Sequence; identical to SEQ ID NO: 9895
  mRNA product Design e-6 comprising derived and/or modified sequence from HRSV(Memphis-37)__AIY60638.1__M (opt2)

SEQ ID NO: 20056 - RNA, 1140 nt, Artificial Sequence; identical to SEQ ID NO: 9896
  mRNA product Design e-6 comprising derived and/or modified sequence from HRSV(Memphis-37)__AIY60638.1__M (opt3)

SEQ ID NO: 20057 - RNA, 1140 nt, Artificial Sequence; identical to SEQ ID NO: 9897
  mRNA product Design e-6 comprising derived and/or modified sequence from HRSV(Memphis-37)__AIY60638.1__M (opt4)

SEQ ID NO: 20058 - RNA, 1140 nt, Artificial Sequence; identical to SEQ ID NO: 9898
  mRNA product Design e-6 comprising derived and/or modified sequence from HRSV(Memphis-37)__AIY60638.1__M (opt5)

SEQ ID NO: 20059 - RNA, 1140 nt, Artificial Sequence
  mRNA product Design e-6 comprising derived and/or modified sequence from HRSV(Memphis-37)__AIY60638.1__M (opt6)
gggagagcggcucggccauuuugucccagucaguccggaggcugcggcugcagaaguaccgccugcggaguaacugcaaagaagcuuaccauggaaacauauguaaacaaauuacacgaaggauccacuuacacagccgcaguacaauacaauguacuagaaaaagacgacgacccagcaucacuaacaauauggguacccauguuccaauccucaaugccagcagaccuccuaauaaaagaacuagcuaauguaaacauacucguaaaacaaauauccacaccaaaaggaccaucacuacgaguaaugauaaacuccagauccgcaguacuagcacaaaugccaucaaaauucacaauaugcgccaacguaucacuagacgaaagaucaaaauuagcauacgacguaacaacaccaugcgaaauaaaagcaugcucacucacaugcuuaaaaucaaaaaacaugcuaacaacaguaaaagaccuaacaaugaaaacacucaaccccacccacgacauaauugccuuaugcgaauuugaaaacauaguaacauccaaaaaaguaauaauaccaacauaccuaagauccauuucaguaagaaacaaagaccuaaacacacuagaaaacauaacaacaacagaauuuaaaaacgcaauaacaaacgcaaaaauaauaccauacucaggauuacuacuuguaauaacaguaacagacaacaaaggagcauucaaauacauaaaaccucaaucacaauuuauaguagaccuaggagcauacuuagaaaaagaaucaaucuauuacgucacuacaaacuggaaacacacagcaaccagauucgcaauaaaacccauggaagacuaaggacuaguacuggcugcaucucccuuuccucuguccuccauccuucucccaggauggugaagggggaccugguacccagugauccccaccccaggauccuaaaucaugacuuaccugcuaauaaaaacucauuggaaaagugagaagaucuaaaaaaaaaaaaaaaaaaaaaaaaaaaaaaaaaaaaaaaaaaaaaaaaaaaaaaaaaaaaaaaaugcaucccccccccccccccccccccccccccccccaaaggcucuuuucagagccaccagaauu

SEQ ID NO: 20060 - RNA, 1140 nt, Artificial Sequence
  mRNA product Design e-6 comprising derived and/or modified sequence from HRSV(Memphis-37)__AIY60638.1__M (opt11)
gggagagcggcucggccauuuugucccagucaguccggaggcugcggcugcagaaguaccgccugcggaguaacugcaaagaagcuuaccauggaaaccuacgucaacaaacuccacgaaggauccaccuacaccgccgccguccaauacaacguccuugaaaaagacgacgaccccgccucccucaccaucuggguccccauguuccaauccucaaugcccgccgaccuccuaaucaaagaacucgccaacgucaacauccucgucaaacaaaucuccacccccaaaggccccucccuccgagucaugaucaacucccgcuccgccguccucgcacaaaugcccuccaaauucaccaucugcgccaacguaucccucgacgaacgcuccaaacucgcauacgacguuaccacucccugcgaaaucaaagccugcucacucaccugccucaaauccaaaaacaugcucaccaccgucaaagaccucaccaugaaaacccuaaaccccacccacgacaucaucgcccucugcgaauuugaaaacauagucaccuccaaaaaaguaaucauccccaccuaccuccgcuccaucuccguccgcaacaaagaccucaacacacucgaaaacaucacaaccaccgaauuuaaaaacgccaucaccaacgccaaaaucaucccauacuccggccuccuccuagucaucaccgucaccgacaacaaaggcgccuucaaguacaucaaaccacaaucccaauucaucgucgaccucggcgccuaccucgaaaaagaauccaucuacuacguaaccaccaacuggaaacacaccgccacccgcuucgccaucaaacccauggaagacuaaggacuaguacuggcugcaucucccuuuccucuguccuccauccuucucccaggauggugaagggggaccugguacccagugauccccaccccaggauccuaaaucaugacuuaccugcuaauaaaaacucauuggaaaagugagaagaucuaaaaaaaaaaaaaaaaaaaaaaaaaaaaaaaaaaaaaaaaaaaaaaaaaaaaaaaaaaaaaaaaugcaucccccccccccccccccccccccccccccccaaaggcucuuuucagagccaccagaauu

SEQ ID NO: 20061 - RNA, 1356 nt, Artificial Sequence
  mRNA product Design f-1 comprising derived and/or modified sequence from HRSV(Memphis-37)__AIY60638.1__M (wt)
gggagagcggcucggccauuuugucccagucaguccggaggcugcggcugcagaaguaccgccugcggaguaacugcaaagaagcuuaccauggaaacauacgugaacaaacuucacgaaggcuccacauacacagcugcuguucaauacaauguccuagaaaaagacgaugacccugcaucacuuacaauaugggugcccauguuccaaucauccaugccagcagauuuacuuauaaaagaacuagcuaaugucaacauacuagugaaacaaauauccacacccaaaggaccuucauuaagagucaugauaaacucaagaagugcagugcuagcacaaaugcccagcaaauucacuauaugugccaauguguccuuggaugaaagaagcaagcuggcauaugauguaaccacacccugcgaaaucaaggcauguagucuaacaugccuaaaaucaaaaaauauguuaacuacaguuaaagaucucacuaugaaaacacucaacccaacacaugacaucauugcuuuaugugaauuugaaaauauaguaacaucaaaaaaagucauaauaccaacauacuuaagauccaucagugucagaaauaaagaucugaacacacuugaaaauauaacaaccaccgaauucaaaaaugccaucacaaaugcaaaaaucaucccuuacucaggauuacuguuagucaucacagugacugacaacaaaggagcauuuaaauacauaaagccacaaagucaauucauaguagaucuuggagcuuaccuagaaaaagaaaguauauauuauguuacaacaaauuggaagcacacagcuacacgauuugcaaucaaacccauggaagauuaaggacuagugaagggaacacccaaauuuaauucagccuuaagcacaauuaauuaagagugaaacguaauuguacaagcaguuggucacccaccauagggcaugaucaacaccgcaaccuuuccuuuuucccccagugauucugaaaaaccccucuucccuucagcuugcuuagauguuccaaauuuaguaagcuuaaggcggccuacagaagaaaaagaaaaaaaaggccacaaaaguucccucucacuuucaguaaauaaaauaaaagcagcaacagaaauaaagaaauaaaugaaauucaaaaugaaauaaauauuguguugugcagcauuaaaaaaucaauaaaaauuaaaaaugagcaagaucuaaaaaaaaaaaaaaaaaaaaaaaaaaaaaaaaaaaaaaaaaaaaaaaaaaaaaaaaaaaaaaaaugcaucccccccccccccccccccccccccccccccaaaggcucuuuucagagccaccagaauu

SEQ ID NO: 20062 - RNA, 1356 nt, Artificial Sequence; identical to SEQ ID NO: 9902
  mRNA product Design f-1 comprising derived and/or modified sequence from HRSV(Memphis-37)__AIY60638.1__M (opt1)

SEQ ID NO: 20063 - RNA, 1356 nt, Artificial Sequence; identical to SEQ ID NO: 9903
  mRNA product Design f-1 comprising derived and/or modified sequence from HRSV(Memphis-37)__AIY60638.1__M (opt2)

SEQ ID NO: 20064 - RNA, 1356 nt, Artificial Sequence; identical to SEQ ID NO: 9904
  mRNA product Design f-1 comprising derived and/or modified sequence from HRSV(Memphis-37)__AIY60638.1__M (opt3)

SEQ ID NO: 20065 - RNA, 1356 nt, Artificial Sequence; identical to SEQ ID NO: 9905
  mRNA product Design f-1 comprising derived and/or modified sequence from HRSV(Memphis-37)__AIY60638.1__M (opt4)

SEQ ID NO: 20066 - RNA, 1356 nt, Artificial Sequence; identical to SEQ ID NO: 9906
  mRNA product Design f-1 comprising derived and/or modified sequence from HRSV(Memphis-37)__AIY60638.1__M (opt5)

SEQ ID NO: 20067 - RNA, 1356 nt, Artificial Sequence
  mRNA product Design f-1 comprising derived and/or modified sequence from HRSV(Memphis-37)__AIY60638.1__M (opt6)
gggagagcggcucggccauuuugucccagucaguccggaggcugcggcugcagaaguaccgccugcggaguaacugcaaagaagcuuaccauggaaacauauguaaacaaauuacacgaaggauccacuuacacagccgcaguacaauacaauguacuagaaaaagacgacgacccagcaucacuaacaauauggguacccauguuccaauccucaaugccagcagaccuccuaauaaaagaacuagcuaauguaaacauacucguaaaacaaauauccacaccaaaaggaccaucacuacgaguaaugauaaacuccagauccgcaguacuagcacaaaugccaucaaaauucacaauaugcgccaacguaucacuagacgaaagaucaaaauuagcauacgacguaacaacaccaugcgaaauaaaagcaugcucacucacaugcuuaaaaucaaaaaacaugcuaacaacaguaaaagaccuaacaaugaaaacacucaaccccacccacgacauaauugccuuaugcgaauuugaaaacauaguaacauccaaaaaaguaauaauaccaacauaccuaagauccauuucaguaagaaacaaagaccuaaacacacuagaaaacauaacaacaacagaauuuaaaaacgcaauaacaaacgcaaaaauaauaccauacucaggauuacuacuuguaauaacaguaacagacaacaaaggagcauucaaauacauaaaaccucaaucacaauuuauaguagaccuaggagcauacuuagaaaaagaaucaaucuauuacgucacuacaaacuggaaacacacagcaaccagauucgcaauaaaacccauggaagacuaaggacuagugaagggaacacccaaauuuaauucagccuuaagcacaauuaauuaagagugaaacguaauuguacaagcaguuggucacccaccauagggcaugaucaacaccgcaaccuuuccuuuuucccccagugauucugaaaaaccccucuucccuucagcuugcuuagauguuccaaauuuaguaagcuuaaggcggccuacagaagaaaaagaaaaaaaaggccacaaaaguucccucucacuuucaguaaauaaaauaaaagcagcaacagaaauaaagaaauaaaugaaauucaaaaugaaauaaauauuguguugugcagcauuaaaaaaucaauaaaaauuaaaaaugagcaagaucuaaaaaaaaaaaaaaaaaaaaaaaaaaaaaaaaaaaaaaaaaaaaaaaaaaaaaaaaaaaaaaaaugcaucccccccccccccccccccccccccccccccaaaggcucuuuucagagccaccagaauu

SEQ ID NO: 20068 - RNA, 1356 nt, Artificial Sequence
  mRNA product Design f-1 comprising derived and/or modified sequence from HRSV(Memphis-37)__AIY60638.1__M (opt11)
gggagagcggcucggccauuuugucccagucaguccggaggcugcggcugcagaaguaccgccugcggaguaacugcaaagaagcuuaccauggaaaccuacgucaacaaacuccacgaaggauccaccuacaccgccgccguccaauacaacguccuugaaaaagacgacgaccccgccucccucaccaucuggguccccauguuccaauccucaaugcccgccgaccuccuaaucaaagaacucgccaacgucaacauccucgucaaacaaaucuccacccccaaaggccccucccuccgagucaugaucaacucccgcuccgccguccucgcacaaaugcccuccaaauucaccaucugcgccaacguaucccucgacgaacgcuccaaacucgcauacgacguuaccacucccugcgaaaucaaagccugcucacucaccugccucaaauccaaaaacaugcucaccaccgucaaagaccucaccaugaaaacccuaaaccccacccacgacaucaucgcccucugcgaauuugaaaacauagucaccuccaaaaaaguaaucauccccaccuaccuccgcuccaucuccguccgcaacaaagaccucaacacacucgaaaacaucacaaccaccgaauuuaaaaacgccaucaccaacgccaaaaucaucccauacuccggccuccuccuagucaucaccgucaccgacaacaaaggcgccuucaaguacaucaaaccacaaucccaauucaucgucgaccucggcgccuaccucgaaaaagaauccaucuacuacguaaccaccaacuggaaacacaccgccacccgcuucgccaucaaacccauggaagacuaaggacuagugaagggaacacccaaauuuaauucagccuuaagcacaauuaauuaagagugaaacguaauuguacaagcaguuggucacccaccauagggcaugaucaacaccgcaaccuuuccuuuuucccccagugauucugaaaaaccccucuucccuucagcuugcuuagauguuccaaauuuaguaagcuuaaggcggccuacagaagaaaaagaaaaaaaaggccacaaaaguucccucucacuuucaguaaauaaaauaaaagcagcaacagaaauaaagaaauaaaugaaauucaaaaugaaauaaauauuguguugugcagcauuaaaaaaucaauaaaaauuaaaaaugagcaagaucuaaaaaaaaaaaaaaaaaaaaaaaaaaaaaaaaaaaaaaaaaaaaaaaaaaaaaaaaaaaaaaaaugcaucccccccccccccccccccccccccccccccaaaggcucuuuucagagccaccagaauu

SEQ ID NO: 20069 - RNA, 1136 nt, Artificial Sequence
  mRNA product Design f-2 comprising derived and/or modified sequence from HRSV(Memphis-37)__AIY60638.1__M (wt)
gggagagcggcucggccauuuugucccagucaguccggaggcugcggcugcagaaguaccgccugcggaguaacugcaaagaagcuuaccauggaaacauacgugaacaaacuucacgaaggcuccacauacacagcugcuguucaauacaauguccuagaaaaagacgaugacccugcaucacuuacaauaugggugcccauguuccaaucauccaugccagcagauuuacuuauaaaagaacuagcuaaugucaacauacuagugaaacaaauauccacacccaaaggaccuucauuaagagucaugauaaacucaagaagugcagugcuagcacaaaugcccagcaaauucacuauaugugccaauguguccuuggaugaaagaagcaagcuggcauaugauguaaccacacccugcgaaaucaaggcauguagucuaacaugccuaaaaucaaaaaauauguuaacuacaguuaaagaucucacuaugaaaacacucaacccaacacaugacaucauugcuuuaugugaauuugaaaauauaguaacaucaaaaaaagucauaauaccaacauacuuaagauccaucagugucagaaauaaagaucugaacacacuugaaaauauaacaaccaccgaauucaaaaaugccaucacaaaugcaaaaaucaucccuuacucaggauuacuguuagucaucacagugacugacaacaaaggagcauuuaaauacauaaagccacaaagucaauucauaguagaucuuggagcuuaccuagaaaaagaaaguauauauuauguuacaacaaauuggaagcacacagcuacacgauuugcaaucaaacccauggaagauuaaggacuaguggaagcauuuuccuggcugauuaaaagaaauuacucagcuauggucaucuguuccuguuagaaggcuaugcagcauauuauauacuaugcgcauguuaugaaaugcauaauaaaaaauuuuaaaaaaucuaaaagaucuaaaaaaaaaaaaaaaaaaaaaaaaaaaaaaaaaaaaaaaaaaaaaaaaaaaaaaaaaaaaaaaaugcaucccccccccccccccccccccccccccccccaaaggcucuuuucagagccaccagaauu

SEQ ID NO: 20070 - RNA, 1136 nt, Artificial Sequence; identical to SEQ ID NO: 9910
  mRNA product Design f-2 comprising derived and/or modified sequence from HRSV(Memphis-37)__AIY60638.1__M (opt1)

SEQ ID NO: 20071 - RNA, 1136 nt, Artificial Sequence; identical to SEQ ID NO: 9911
  mRNA product Design f-2 comprising derived and/or modified sequence from HRSV(Memphis-37)__AIY60638.1__M (opt2)

SEQ ID NO: 20072 - RNA, 1136 nt, Artificial Sequence; identical to SEQ ID NO: 9912
  mRNA product Design f-2 comprising derived and/or modified sequence from HRSV(Memphis-37)__AIY60638.1__M (opt3)

SEQ ID NO: 20073 - RNA, 1136 nt, Artificial Sequence; identical to SEQ ID NO: 9913
  mRNA product Design f-2 comprising derived and/or modified sequence from HRSV(Memphis-37)__AIY60638.1__M (opt4)

SEQ ID NO: 20074 - RNA, 1136 nt, Artificial Sequence; identical to SEQ ID NO: 9914
  mRNA product Design f-2 comprising derived and/or modified sequence from HRSV(Memphis-37)__AIY60638.1__M (opt5)

SEQ ID NO: 20075 - RNA, 1136 nt, Artificial Sequence
  mRNA product Design f-2 comprising derived and/or modified sequence from HRSV(Memphis-37)__AIY60638.1__M (opt6)
gggagagcggcucggccauuuugucccagucaguccggaggcugcggcugcagaaguaccgccugcggaguaacugcaaagaagcuuaccauggaaacauauguaaacaaauuacacgaaggauccacuuacacagccgcaguacaauacaauguacuagaaaaagacgacgacccagcaucacuaacaauauggguacccauguuccaauccucaaugccagcagaccuccuaauaaaagaacuagcuaauguaaacauacucguaaaacaaauauccacaccaaaaggaccaucacuacgaguaaugauaaacuccagauccgcaguacuagcacaaaugccaucaaaauucacaauaugcgccaacguaucacuagacgaaagaucaaaauuagcauacgacguaacaacaccaugcgaaauaaaagcaugcucacucacaugcuuaaaaucaaaaaacaugcuaacaacaguaaaagaccuaacaaugaaaacacucaaccccacccacgacauaauugccuuaugcgaauuugaaaacauaguaacauccaaaaaaguaauaauaccaacauaccuaagauccauuucaguaagaaacaaagaccuaaacacacuagaaaacauaacaacaacagaauuuaaaaacgcaauaacaaacgcaaaaauaauaccauacucaggauuacuacuuguaauaacaguaacagacaacaaaggagcauucaaauacauaaaaccucaaucacaauuuauaguagaccuaggagcauacuuagaaaaagaaucaaucuauuacgucacuacaaacuggaaacacacagcaaccagauucgcaauaaaacccauggaagacuaaggacuaguggaagcauuuuccuggcugauuaaaagaaauuacucagcuauggucaucuguuccuguuagaaggcuaugcagcauauuauauacuaugcgcauguuaugaaaugcauaauaaaaaauuuuaaaaaaucuaaaagaucuaaaaaaaaaaaaaaaaaaaaaaaaaaaaaaaaaaaaaaaaaaaaaaaaaaaaaaaaaaaaaaaaugcaucccccccccccccccccccccccccccccccaaaggcucuuuucagagccaccagaauu

SEQ ID NO: 20076 - RNA, 1136 nt, Artificial Sequence
  mRNA product Design f-2 comprising derived and/or modified sequence from HRSV(Memphis-37)__AIY60638.1__M (opt11)
gggagagcggcucggccauuuugucccagucaguccggaggcugcggcugcagaaguaccgccugcggaguaacugcaaagaagcuuaccauggaaaccuacgucaacaaacuccacgaaggauccaccuacaccgccgccguccaauacaacguccuugaaaaagacgacgaccccgccucccucaccaucuggguccccauguuccaauccucaaugcccgccgaccuccuaaucaaagaacucgccaacgucaacauccucgucaaacaaaucuccacccccaaaggccccucccuccgagucaugaucaacucccgcuccgccguccucgcacaaaugcccuccaaauucaccaucugcgccaacguaucccucgacgaacgcuccaaacucgcauacgacguuaccacucccugcgaaaucaaagccugcucacucaccugccucaaauccaaaaacaugcucaccaccgucaaagaccucaccaugaaaacccuaaaccccacccacgacaucaucgcccucugcgaauuugaaaacauagucaccuccaaaaaaguaaucauccccaccuaccuccgcuccaucuccguccgcaacaaagaccucaacacacucgaaaacaucacaaccaccgaauuuaaaaacgccaucaccaacgccaaaaucaucccauacuccggccuccuccuagucaucaccgucaccgacaacaaaggcgccuucaaguacaucaaaccacaaucccaauucaucgucgaccucggcgccuaccucgaaaaagaauccaucuacuacguaaccaccaacuggaaacacaccgccacccgcuucgccaucaaacccauggaagacuaaggacuaguggaagcauuuuccuggcugauuaaaagaaauuacucagcuauggucaucuguuccuguuagaaggcuaugcagcauauuauauacuaugcgcauguuaugaaaugcauaauaaaaaauuuuaaaaaaucuaaaagaucuaaaaaaaaaaaaaaaaaaaaaaaaaaaaaaaaaaaaaaaaaaaaaaaaaaaaaaaaaaaaaaaaugcaucccccccccccccccccccccccccccccccaaaggcucuuuucagagccaccagaauu

SEQ ID NO: 20077 - RNA, 1127 nt, Artificial Sequence
  mRNA product Design f-3 comprising derived and/or modified sequence from HRSV(Memphis-37)__AIY60638.1__M (wt)
gggagagucccgcagucggcguccagcggcucugcuuguucgugugugugucguugcaggccuuauucaagcuuaccauggaaacauacgugaacaaacuucacgaaggcuccacauacacagcugcuguucaauacaauguccuagaaaaagacgaugacccugcaucacuuacaauaugggugcccauguuccaaucauccaugccagcagauuuacuuauaaaagaacuagcuaaugucaacauacuagugaaacaaauauccacacccaaaggaccuucauuaagagucaugauaaacucaagaagugcagugcuagcacaaaugcccagcaaauucacuauaugugccaauguguccuuggaugaaagaagcaagcuggcauaugauguaaccacacccugcgaaaucaaggcauguagucuaacaugccuaaaaucaaaaaauauguuaacuacaguuaaagaucucacuaugaaaacacucaacccaacacaugacaucauugcuuuaugugaauuugaaaauauaguaacaucaaaaaaagucauaauaccaacauacuuaagauccaucagugucagaaauaaagaucugaacacacuugaaaauauaacaaccaccgaauucaaaaaugccaucacaaaugcaaaaaucaucccuuacucaggauuacuguuagucaucacagugacugacaacaaaggagcauuuaaauacauaaagccacaaagucaauucauaguagaucuuggagcuuaccuagaaaaagaaaguauauauuauguuacaacaaauuggaagcacacagcuacacgauuugcaaucaaacccauggaagauuaaggacuaguacuggcugcaucucccuuuccucuguccuccauccuucucccaggauggugaagggggaccugguacccagugauccccaccccaggauccuaaaucaugacuuaccugcuaauaaaaacucauuggaaaagugagaagaucuaaaaaaaaaaaaaaaaaaaaaaaaaaaaaaaaaaaaaaaaaaaaaaaaaaaaaaaaaaaaaaaaugcaucccccccccccccccccccccccccccccccaaaggcucuuuucagagccaccagaauu

SEQ ID NO: 20078 - RNA, 1127 nt, Artificial Sequence; identical to SEQ ID NO: 9918
  mRNA product Design f-3 comprising derived and/or modified sequence from HRSV(Memphis-37)__AIY60638.1__M (opt1)

SEQ ID NO: 20079 - RNA, 1127 nt, Artificial Sequence; identical to SEQ ID NO: 9919
  mRNA product Design f-3 comprising derived and/or modified sequence from HRSV(Memphis-37)__AIY60638.1__M (opt2)

SEQ ID NO: 20080 - RNA, 1127 nt, Artificial Sequence; identical to SEQ ID NO: 9920
  mRNA product Design f-3 comprising derived and/or modified sequence from HRSV(Memphis-37)__AIY60638.1__M (opt3)

SEQ ID NO: 20081 - RNA, 1127 nt, Artificial Sequence; identical to SEQ ID NO: 9921
  mRNA product Design f-3 comprising derived and/or modified sequence from HRSV(Memphis-37)__AIY60638.1__M (opt4)

SEQ ID NO: 20082 - RNA, 1127 nt, Artificial Sequence; identical to SEQ ID NO: 9922
  mRNA product Design f-3 comprising derived and/or modified sequence from HRSV(Memphis-37)__AIY60638.1__M (opt5)

SEQ ID NO: 20083 - RNA, 1127 nt, Artificial Sequence
  mRNA product Design f-3 comprising derived and/or modified sequence from HRSV(Memphis-37)__AIY60638.1__M (opt6)
gggagagucccgcagucggcguccagcggcucugcuuguucgugugugugucguugcaggccuuauucaagcuuaccauggaaacauauguaaacaaauuacacgaaggauccacuuacacagccgcaguacaauacaauguacuagaaaaagacgacgacccagcaucacuaacaauauggguacccauguuccaauccucaaugccagcagaccuccuaauaaaagaacuagcuaauguaaacauacucguaaaacaaauauccacaccaaaaggaccaucacuacgaguaaugauaaacuccagauccgcaguacuagcacaaaugccaucaaaauucacaauaugcgccaacguaucacuagacgaaagaucaaaauuagcauacgacguaacaacaccaugcgaaauaaaagcaugcucacucacaugcuuaaaaucaaaaaacaugcuaacaacaguaaaagaccuaacaaugaaaacacucaaccccacccacgacauaauugccuuaugcgaauuugaaaacauaguaacauccaaaaaaguaauaauaccaacauaccuaagauccauuucaguaagaaacaaagaccuaaacacacuagaaaacauaacaacaacagaauuuaaaaacgcaauaacaaacgcaaaaauaauaccauacucaggauuacuacuuguaauaacaguaacagacaacaaaggagcauucaaauacauaaaaccucaaucacaauuuauaguagaccuaggagcauacuuagaaaaagaaucaaucuauuacgucacuacaaacuggaaacacacagcaaccagauucgcaauaaaacccauggaagacuaaggacuaguacuggcugcaucucccuuuccucuguccuccauccuucucccaggauggugaagggggaccugguacccagugauccccaccccaggauccuaaaucaugacuuaccugcuaauaaaaacucauuggaaaagugagaagaucuaaaaaaaaaaaaaaaaaaaaaaaaaaaaaaaaaaaaaaaaaaaaaaaaaaaaaaaaaaaaaaaaugcaucccccccccccccccccccccccccccccccaaaggcucuuuucagagccaccagaauu

SEQ ID NO: 20084 - RNA, 1127 nt, Artificial Sequence
  mRNA product Design f-3 comprising derived and/or modified sequence from HRSV(Memphis-37)__AIY60638.1__M (opt11)
gggagagucccgcagucggcguccagcggcucugcuuguucgugugugugucguugcaggccuuauucaagcuuaccauggaaaccuacgucaacaaacuccacgaaggauccaccuacaccgccgccguccaauacaacguccuugaaaaagacgacgaccccgccucccucaccaucuggguccccauguuccaauccucaaugcccgccgaccuccuaaucaaagaacucgccaacgucaacauccucgucaaacaaaucuccacccccaaaggccccucccuccgagucaugaucaacucccgcuccgccguccucgcacaaaugcccuccaaauucaccaucugcgccaacguaucccucgacgaacgcuccaaacucgcauacgacguuaccacucccugcgaaaucaaagccugcucacucaccugccucaaauccaaaaacaugcucaccaccgucaaagaccucaccaugaaaacccuaaaccccacccacgacaucaucgcccucugcgaauuugaaaacauagucaccuccaaaaaaguaaucauccccaccuaccuccgcuccaucuccguccgcaacaaagaccucaacacacucgaaaacaucacaaccaccgaauuuaaaaacgccaucaccaacgccaaaaucaucccauacuccggccuccuccuagucaucaccgucaccgacaacaaaggcgccuucaaguacaucaaaccacaaucccaauucaucgucgaccucggcgccuaccucgaaaaagaauccaucuacuacguaaccaccaacuggaaacacaccgccacccgcuucgccaucaaacccauggaagacuaaggacuaguacuggcugcaucucccuuuccucuguccuccauccuucucccaggauggugaagggggaccugguacccagugauccccaccccaggauccuaaaucaugacuuaccugcuaauaaaaacucauuggaaaagugagaagaucuaaaaaaaaaaaaaaaaaaaaaaaaaaaaaaaaaaaaaaaaaaaaaaaaaaaaaaaaaaaaaaaaugcaucccccccccccccccccccccccccccccccaaaggcucuuuucagagccaccagaauu

SEQ ID NO: 20085 - RNA, 1343 nt, Artificial Sequence
  mRNA product Design f-4 comprising derived and/or modified sequence from HRSV(Memphis-37)__AIY60638.1__M (wt)
gggagagucccgcagucggcguccagcggcucugcuuguucgugugugugucguugcaggccuuauucaagcuuaccauggaaacauacgugaacaaacuucacgaaggcuccacauacacagcugcuguucaauacaauguccuagaaaaagacgaugacccugcaucacuuacaauaugggugcccauguuccaaucauccaugccagcagauuuacuuauaaaagaacuagcuaaugucaacauacuagugaaacaaauauccacacccaaaggaccuucauuaagagucaugauaaacucaagaagugcagugcuagcacaaaugcccagcaaauucacuauaugugccaauguguccuuggaugaaagaagcaagcuggcauaugauguaaccacacccugcgaaaucaaggcauguagucuaacaugccuaaaaucaaaaaauauguuaacuacaguuaaagaucucacuaugaaaacacucaacccaacacaugacaucauugcuuuaugugaauuugaaaauauaguaacaucaaaaaaagucauaauaccaacauacuuaagauccaucagugucagaaauaaagaucugaacacacuugaaaauauaacaaccaccgaauucaaaaaugccaucacaaaugcaaaaaucaucccuuacucaggauuacuguuagucaucacagugacugacaacaaaggagcauuuaaauacauaaagccacaaagucaauucauaguagaucuuggagcuuaccuagaaaaagaaaguauauauuauguuacaacaaauuggaagcacacagcuacacgauuugcaaucaaacccauggaagauuaaggacuagugaagggaacacccaaauuuaauucagccuuaagcacaauuaauuaagagugaaacguaauuguacaagcaguuggucacccaccauagggcaugaucaacaccgcaaccuuuccuuuuucccccagugauucugaaaaaccccucuucccuucagcuugcuuagauguuccaaauuuaguaagcuuaaggcggccuacagaagaaaaagaaaaaaaaggccacaaaaguucccucucacuuucaguaaauaaaauaaaagcagcaacagaaauaaagaaauaaaugaaauucaaaaugaaauaaauauuguguugugcagcauuaaaaaaucaauaaaaauuaaaaaugagcaagaucuaaaaaaaaaaaaaaaaaaaaaaaaaaaaaaaaaaaaaaaaaaaaaaaaaaaaaaaaaaaaaaaaugcaucccccccccccccccccccccccccccccccaaaggcucuuuucagagccaccagaauu

SEQ ID NO: 20086 - RNA, 1343 nt, Artificial Sequence; identical to SEQ ID NO: 9926
  mRNA product Design f-4 comprising derived and/or modified sequence from HRSV(Memphis-37)__AIY60638.1__M (opt1)

SEQ ID NO: 20087 - RNA, 1343 nt, Artificial Sequence; identical to SEQ ID NO: 9927
  mRNA product Design f-4 comprising derived and/or modified sequence from HRSV(Memphis-37)__AIY60638.1__M (opt2)

SEQ ID NO: 20088 - RNA, 1343 nt, Artificial Sequence; identical to SEQ ID NO: 9928
  mRNA product Design f-4 comprising derived and/or modified sequence from HRSV(Memphis-37)__AIY60638.1__M (opt3)

SEQ ID NO: 20089 - RNA, 1343 nt, Artificial Sequence; identical to SEQ ID NO: 9929
  mRNA product Design f-4 comprising derived and/or modified sequence from HRSV(Memphis-37)__AIY60638.1__M (opt4)

SEQ ID NO: 20090 - RNA, 1343 nt, Artificial Sequence; identical to SEQ ID NO: 9930
  mRNA product Design f-4 comprising derived and/or modified sequence from HRSV(Memphis-37)__AIY60638.1__M (opt5)

SEQ ID NO: 20091 - RNA, 1343 nt, Artificial Sequence
  mRNA product Design f-4 comprising derived and/or modified sequence from HRSV(Memphis-37)__AIY60638.1__M (opt6)
gggagagucccgcagucggcguccagcggcucugcuuguucgugugugugucguugcaggccuuauucaagcuuaccauggaaacauauguaaacaaauuacacgaaggauccacuuacacagccgcaguacaauacaauguacuagaaaaagacgacgacccagcaucacuaacaauauggguacccauguuccaauccucaaugccagcagaccuccuaauaaaagaacuagcuaauguaaacauacucguaaaacaaauauccacaccaaaaggaccaucacuacgaguaaugauaaacuccagauccgcaguacuagcacaaaugccaucaaaauucacaauaugcgccaacguaucacuagacgaaagaucaaaauuagcauacgacguaacaacaccaugcgaaauaaaagcaugcucacucacaugcuuaaaaucaaaaaacaugcuaacaacaguaaaagaccuaacaaugaaaacacucaaccccacccacgacauaauugccuuaugcgaauuugaaaacauaguaacauccaaaaaaguaauaauaccaacauaccuaagauccauuucaguaagaaacaaagaccuaaacacacuagaaaacauaacaacaacagaauuuaaaaacgcaauaacaaacgcaaaaauaauaccauacucaggauuacuacuuguaauaacaguaacagacaacaaaggagcauucaaauacauaaaaccucaaucacaauuuauaguagaccuaggagcauacuuagaaaaagaaucaaucuauuacgucacuacaaacuggaaacacacagcaaccagauucgcaauaaaacccauggaagacuaaggacuagugaagggaacacccaaauuuaauucagccuuaagcacaauuaauuaagagugaaacguaauuguacaagcaguuggucacccaccauagggcaugaucaacaccgcaaccuuuccuuuuucccccagugauucugaaaaaccccucuucccuucagcuugcuuagauguuccaaauuuaguaagcuuaaggcggccuacagaagaaaaagaaaaaaaaggccacaaaaguucccucucacuuucaguaaauaaaauaaaagcagcaacagaaauaaagaaauaaaugaaauucaaaaugaaauaaauauuguguugugcagcauuaaaaaaucaauaaaaauuaaaaaugagcaagaucuaaaaaaaaaaaaaaaaaaaaaaaaaaaaaaaaaaaaaaaaaaaaaaaaaaaaaaaaaaaaaaaaugcaucccccccccccccccccccccccccccccccaaaggcucuuuucagagccaccagaauu

SEQ ID NO: 20092 - RNA, 1343 nt, Artificial Sequence
  mRNA product Design f-4 comprising derived and/or modified sequence from HRSV(Memphis-37)__AIY60638.1__M (opt11)
gggagagucccgcagucggcguccagcggcucugcuuguucgugugugugucguugcaggccuuauucaagcuuaccauggaaaccuacgucaacaaacuccacgaaggauccaccuacaccgccgccguccaauacaacguccuugaaaaagacgacgaccccgccucccucaccaucuggguccccauguuccaauccucaaugcccgccgaccuccuaaucaaagaacucgccaacgucaacauccucgucaaacaaaucuccacccccaaaggccccucccuccgagucaugaucaacucccgcuccgccguccucgcacaaaugcccuccaaauucaccaucugcgccaacguaucccucgacgaacgcuccaaacucgcauacgacguuaccacucccugcgaaaucaaagccugcucacucaccugccucaaauccaaaaacaugcucaccaccgucaaagaccucaccaugaaaacccuaaaccccacccacgacaucaucgcccucugcgaauuugaaaacauagucaccuccaaaaaaguaaucauccccaccuaccuccgcuccaucuccguccgcaacaaagaccucaacacacucgaaaacaucacaaccaccgaauuuaaaaacgccaucaccaacgccaaaaucaucccauacuccggccuccuccuagucaucaccgucaccgacaacaaaggcgccuucaaguacaucaaaccacaaucccaauucaucgucgaccucggcgccuaccucgaaaaagaauccaucuacuacguaaccaccaacuggaaacacaccgccacccgcuucgccaucaaacccauggaagacuaaggacuagugaagggaacacccaaauuuaauucagccuuaagcacaauuaauuaagagugaaacguaauuguacaagcaguuggucacccaccauagggcaugaucaacaccgcaaccuuuccuuuuucccccagugauucugaaaaaccccucuucccuucagcuugcuuagauguuccaaauuuaguaagcuuaaggcggccuacagaagaaaaagaaaaaaaaggccacaaaaguucccucucacuuucaguaaauaaaauaaaagcagcaacagaaauaaagaaauaaaugaaauucaaaaugaaauaaauauuguguugugcagcauuaaaaaaucaauaaaaauuaaaaaugagcaagaucuaaaaaaaaaaaaaaaaaaaaaaaaaaaaaaaaaaaaaaaaaaaaaaaaaaaaaaaaaaaaaaaaugcaucccccccccccccccccccccccccccccccaaaggcucuuuucagagccaccagaauu

SEQ ID NO: 20093 - RNA, 1119 nt, Artificial Sequence
  mRNA product Design f-5 comprising derived and/or modified sequence from HRSV(Memphis-37)__AIY60638.1__M (wt)
gggagacuuucccauucuguagcagaauuugguguugccuguggucuuggucccgcggagaagcuuaccauggaaacauacgugaacaaacuucacgaaggcuccacauacacagcugcuguucaauacaauguccuagaaaaagacgaugacccugcaucacuuacaauaugggugcccauguuccaaucauccaugccagcagauuuacuuauaaaagaacuagcuaaugucaacauacuagugaaacaaauauccacacccaaaggaccuucauuaagagucaugauaaacucaagaagugcagugcuagcacaaaugcccagcaaauucacuauaugugccaauguguccuuggaugaaagaagcaagcuggcauaugauguaaccacacccugcgaaaucaaggcauguagucuaacaugccuaaaaucaaaaaauauguuaacuacaguuaaagaucucacuaugaaaacacucaacccaacacaugacaucauugcuuuaugugaauuugaaaauauaguaacaucaaaaaaagucauaauaccaacauacuuaagauccaucagugucagaaauaaagaucugaacacacuugaaaauauaacaaccaccgaauucaaaaaugccaucacaaaugcaaaaaucaucccuuacucaggauuacuguuagucaucacagugacugacaacaaaggagcauuuaaauacauaaagccacaaagucaauucauaguagaucuuggagcuuaccuagaaaaagaaaguauauauuauguuacaacaaauuggaagcacacagcuacacgauuugcaaucaaacccauggaagauuaaggacuaguacuggcugcaucucccuuuccucuguccuccauccuucucccaggauggugaagggggaccugguacccagugauccccaccccaggauccuaaaucaugacuuaccugcuaauaaaaacucauuggaaaagugagaagaucuaaaaaaaaaaaaaaaaaaaaaaaaaaaaaaaaaaaaaaaaaaaaaaaaaaaaaaaaaaaaaaaaugcaucccccccccccccccccccccccccccccccaaaggcucuuuucagagccaccagaauu

SEQ ID NO: 20094 - RNA, 1119 nt, Artificial Sequence; identical to SEQ ID NO: 9934
  mRNA product Design f-5 comprising derived and/or modified sequence from HRSV(Memphis-37)__AIY60638.1__M (opt1)

SEQ ID NO: 20095 - RNA, 1119 nt, Artificial Sequence; identical to SEQ ID NO: 9935
  mRNA product Design f-5 comprising derived and/or modified sequence from HRSV(Memphis-37)__AIY60638.1__M (opt2)

SEQ ID NO: 20096 - RNA, 1119 nt, Artificial Sequence; identical to SEQ ID NO: 9936
  mRNA product Design f-5 comprising derived and/or modified sequence from HRSV(Memphis-37)__AIY60638.1__M (opt3)

SEQ ID NO: 20097 - RNA, 1119 nt, Artificial Sequence; identical to SEQ ID NO: 9937
  mRNA product Design f-5 comprising derived and/or modified sequence from HRSV(Memphis-37)__AIY60638.1__M (opt4)

SEQ ID NO: 20098 - RNA, 1119 nt, Artificial Sequence; identical to SEQ ID NO: 9938
  mRNA product Design f-5 comprising derived and/or modified sequence from HRSV(Memphis-37)__AIY60638.1__M (opt5)

SEQ ID NO: 20099 - RNA, 1119 nt, Artificial Sequence
  mRNA product Design f-5 comprising derived and/or modified sequence from HRSV(Memphis-37)__AIY60638.1__M (opt6)
gggagacuuucccauucuguagcagaauuugguguugccuguggucuuggucccgcggagaagcuuaccauggaaacauauguaaacaaauuacacgaaggauccacuuacacagccgcaguacaauacaauguacuagaaaaagacgacgacccagcaucacuaacaauauggguacccauguuccaauccucaaugccagcagaccuccuaauaaaagaacuagcuaauguaaacauacucguaaaacaaauauccacaccaaaaggaccaucacuacgaguaaugauaaacuccagauccgcaguacuagcacaaaugccaucaaaauucacaauaugcgccaacguaucacuagacgaaagaucaaaauuagcauacgacguaacaacaccaugcgaaauaaaagcaugcucacucacaugcuuaaaaucaaaaaacaugcuaacaacaguaaaagaccuaacaaugaaaacacucaaccccacccacgacauaauugccuuaugcgaauuugaaaacauaguaacauccaaaaaaguaauaauaccaacauaccuaagauccauuucaguaagaaacaaagaccuaaacacacuagaaaacauaacaacaacagaauuuaaaaacgcaauaacaaacgcaaaaauaauaccauacucaggauuacuacuuguaauaacaguaacagacaacaaaggagcauucaaauacauaaaaccucaaucacaauuuauaguagaccuaggagcauacuuagaaaaagaaucaaucuauuacgucacuacaaacuggaaacacacagcaaccagauucgcaauaaaacccauggaagacuaaggacuaguacuggcugcaucucccuuuccucuguccuccauccuucucccaggauggugaagggggaccugguacccagugauccccaccccaggauccuaaaucaugacuuaccugcuaauaaaaacucauuggaaaagugagaagaucuaaaaaaaaaaaaaaaaaaaaaaaaaaaaaaaaaaaaaaaaaaaaaaaaaaaaaaaaaaaaaaaaugcaucccccccccccccccccccccccccccccccaaaggcucuuuucagagccaccagaauu

SEQ ID NO: 20100 - RNA, 1119 nt, Artificial Sequence
  mRNA product Design f-5 comprising derived and/or modified sequence from HRSV(Memphis-37)__AIY60638.1__M (opt11)
gggagacuuucccauucuguagcagaauuugguguugccuguggucuuggucccgcggagaagcuuaccauggaaaccuacgucaacaaacuccacgaaggauccaccuacaccgccgccguccaauacaacguccuugaaaaagacgacgaccccgccucccucaccaucuggguccccauguuccaauccucaaugcccgccgaccuccuaaucaaagaacucgccaacgucaacauccucgucaaacaaaucuccacccccaaaggccccucccuccgagucaugaucaacucccgcuccgccguccucgcacaaaugcccuccaaauucaccaucugcgccaacguaucccucgacgaacgcuccaaacucgcauacgacguuaccacucccugcgaaaucaaagccugcucacucaccugccucaaauccaaaaacaugcucaccaccgucaaagaccucaccaugaaaacccuaaaccccacccacgacaucaucgcccucugcgaauuugaaaacauagucaccuccaaaaaaguaaucauccccaccuaccuccgcuccaucuccguccgcaacaaagaccucaacacacucgaaaacaucacaaccaccgaauuuaaaaacgccaucaccaacgccaaaaucaucccauacuccggccuccuccuagucaucaccgucaccgacaacaaaggcgccuucaaguacaucaaaccacaaucccaauucaucgucgaccucggcgccuaccucgaaaaagaauccaucuacuacguaaccaccaacuggaaacacaccgccacccgcuucgccaucaaacccauggaagacuaaggacuaguacuggcugcaucucccuuuccucuguccuccauccuucucccaggauggugaagggggaccugguacccagugauccccaccccaggauccuaaaucaugacuuaccugcuaauaaaaacucauuggaaaagugagaagaucuaaaaaaaaaaaaaaaaaaaaaaaaaaaaaaaaaaaaaaaaaaaaaaaaaaaaaaaaaaaaaaaaugcaucccccccccccccccccccccccccccccccaaaggcucuuuucagagccaccagaauu

SEQ ID NO: 20101 - RNA, 1115 nt, Artificial Sequence
  mRNA product Design g-1 comprising derived and/or modified sequence from HRSV(Memphis-37)__AIY60638.1__M (wt)
gggagacuuucccauucuguagcagaauuugguguugccuguggucuuggucccgcggagaagcuuaccauggaaacauacgugaacaaacuucacgaaggcuccacauacacagcugcuguucaauacaauguccuagaaaaagacgaugacccugcaucacuuacaauaugggugcccauguuccaaucauccaugccagcagauuuacuuauaaaagaacuagcuaaugucaacauacuagugaaacaaauauccacacccaaaggaccuucauuaagagucaugauaaacucaagaagugcagugcuagcacaaaugcccagcaaauucacuauaugugccaauguguccuuggaugaaagaagcaagcuggcauaugauguaaccacacccugcgaaaucaaggcauguagucuaacaugccuaaaaucaaaaaauauguuaacuacaguuaaagaucucacuaugaaaacacucaacccaacacaugacaucauugcuuuaugugaauuugaaaauauaguaacaucaaaaaaagucauaauaccaacauacuuaagauccaucagugucagaaauaaagaucugaacacacuugaaaauauaacaaccaccgaauucaaaaaugccaucacaaaugcaaaaaucaucccuuacucaggauuacuguuagucaucacagugacugacaacaaaggagcauuuaaauacauaaagccacaaagucaauucauaguagaucuuggagcuuaccuagaaaaagaaaguauauauuauguuacaacaaauuggaagcacacagcuacacgauuugcaaucaaacccauggaagauuaaggacuaguggaagcauuuuccuggcugauuaaaagaaauuacucagcuauggucaucuguuccuguuagaaggcuaugcagcauauuauauacuaugcgcauguuaugaaaugcauaauaaaaaauuuuaaaaaaucuaaaagaucuaaaaaaaaaaaaaaaaaaaaaaaaaaaaaaaaaaaaaaaaaaaaaaaaaaaaaaaaaaaaaaaaugcaucccccccccccccccccccccccccccccccaaaggcucuuuucagagccaccagaauu

SEQ ID NO: 20102 - RNA, 1115 nt, Artificial Sequence; identical to SEQ ID NO: 9942
  mRNA product Design g-1 comprising derived and/or modified sequence from HRSV(Memphis-37)__AIY60638.1__M (opt1)

SEQ ID NO: 20103 - RNA, 1115 nt, Artificial Sequence; identical to SEQ ID NO: 9943
  mRNA product Design g-1 comprising derived and/or modified sequence from HRSV(Memphis-37)__AIY60638.1__M (opt2)

SEQ ID NO: 20104 - RNA, 1115 nt, Artificial Sequence; identical to SEQ ID NO: 9944
  mRNA product Design g-1 comprising derived and/or modified sequence from HRSV(Memphis-37)__AIY60638.1__M (opt3)

SEQ ID NO: 20105 - RNA, 1115 nt, Artificial Sequence; identical to SEQ ID NO: 9945
  mRNA product Design g-1 comprising derived and/or modified sequence from HRSV(Memphis-37)__AIY60638.1__M (opt4)

SEQ ID NO: 20106 - RNA, 1115 nt, Artificial Sequence; identical to SEQ ID NO: 9946
  mRNA product Design g-1 comprising derived and/or modified sequence from HRSV(Memphis-37)__AIY60638.1__M (opt5)

SEQ ID NO: 20107 - RNA, 1115 nt, Artificial Sequence
  mRNA product Design g-1 comprising derived and/or modified sequence from HRSV(Memphis-37)__AIY60638.1__M (opt6)
gggagacuuucccauucuguagcagaauuugguguugccuguggucuuggucccgcggagaagcuuaccauggaaacauauguaaacaaauuacacgaaggauccacuuacacagccgcaguacaauacaauguacuagaaaaagacgacgacccagcaucacuaacaauauggguacccauguuccaauccucaaugccagcagaccuccuaauaaaagaacuagcuaauguaaacauacucguaaaacaaauauccacaccaaaaggaccaucacuacgaguaaugauaaacuccagauccgcaguacuagcacaaaugccaucaaaauucacaauaugcgccaacguaucacuagacgaaagaucaaaauuagcauacgacguaacaacaccaugcgaaauaaaagcaugcucacucacaugcuuaaaaucaaaaaacaugcuaacaacaguaaaagaccuaacaaugaaaacacucaaccccacccacgacauaauugccuuaugcgaauuugaaaacauaguaacauccaaaaaaguaauaauaccaacauaccuaagauccauuucaguaagaaacaaagaccuaaacacacuagaaaacauaacaacaacagaauuuaaaaacgcaauaacaaacgcaaaaauaauaccauacucaggauuacuacuuguaauaacaguaacagacaacaaaggagcauucaaauacauaaaaccucaaucacaauuuauaguagaccuaggagcauacuuagaaaaagaaucaaucuauuacgucacuacaaacuggaaacacacagcaaccagauucgcaauaaaacccauggaagacuaaggacuaguggaagcauuuuccuggcugauuaaaagaaauuacucagcuauggucaucuguuccuguuagaaggcuaugcagcauauuauauacuaugcgcauguuaugaaaugcauaauaaaaaauuuuaaaaaaucuaaaagaucuaaaaaaaaaaaaaaaaaaaaaaaaaaaaaaaaaaaaaaaaaaaaaaaaaaaaaaaaaaaaaaaaugcaucccccccccccccccccccccccccccccccaaaggcucuuuucagagccaccagaauu

SEQ ID NO: 20108 - RNA, 1115 nt, Artificial Sequence
  mRNA product Design g-1 comprising derived and/or modified sequence from HRSV(Memphis-37)__AIY60638.1__M (opt11)
gggagacuuucccauucuguagcagaauuugguguugccuguggucuuggucccgcggagaagcuuaccauggaaaccuacgucaacaaacuccacgaaggauccaccuacaccgccgccguccaauacaacguccuugaaaaagacgacgaccccgccucccucaccaucuggguccccauguuccaauccucaaugcccgccgaccuccuaaucaaagaacucgccaacgucaacauccucgucaaacaaaucuccacccccaaaggccccucccuccgagucaugaucaacucccgcuccgccguccucgcacaaaugcccuccaaauucaccaucugcgccaacguaucccucgacgaacgcuccaaacucgcauacgacguuaccacucccugcgaaaucaaagccugcucacucaccugccucaaauccaaaaacaugcucaccaccgucaaagaccucaccaugaaaacccuaaaccccacccacgacaucaucgcccucugcgaauuugaaaacauagucaccuccaaaaaaguaaucauccccaccuaccuccgcuccaucuccguccgcaacaaagaccucaacacacucgaaaacaucacaaccaccgaauuuaaaaacgccaucaccaacgccaaaaucaucccauacuccggccuccuccuagucaucaccgucaccgacaacaaaggcgccuucaaguacaucaaaccacaaucccaauucaucgucgaccucggcgccuaccucgaaaaagaauccaucuacuacguaaccaccaacuggaaacacaccgccacccgcuucgccaucaaacccauggaagacuaaggacuaguggaagcauuuuccuggcugauuaaaagaaauuacucagcuauggucaucuguuccuguuagaaggcuaugcagcauauuauauacuaugcgcauguuaugaaaugcauaauaaaaaauuuuaaaaaaucuaaaagaucuaaaaaaaaaaaaaaaaaaaaaaaaaaaaaaaaaaaaaaaaaaaaaaaaaaaaaaaaaaaaaaaaugcaucccccccccccccccccccccccccccccccaaaggcucuuuucagagccaccagaauu

SEQ ID NO: 20109 - RNA, 1130 nt, Artificial Sequence
  mRNA product Design g-2 comprising derived and/or modified sequence from HRSV(Memphis-37)__AIY60638.1__M (wt)
gggagaguccgcucagccagguugcagaagcggcuuagcguguguccuaaucuucucucugcguguagguaggccugugccgcaaacaagcuuaccauggaaacauacgugaacaaacuucacgaaggcuccacauacacagcugcuguucaauacaauguccuagaaaaagacgaugacccugcaucacuuacaauaugggugcccauguuccaaucauccaugccagcagauuuacuuauaaaagaacuagcuaaugucaacauacuagugaaacaaauauccacacccaaaggaccuucauuaagagucaugauaaacucaagaagugcagugcuagcacaaaugcccagcaaauucacuauaugugccaauguguccuuggaugaaagaagcaagcuggcauaugauguaaccacacccugcgaaaucaaggcauguagucuaacaugccuaaaaucaaaaaauauguuaacuacaguuaaagaucucacuaugaaaacacucaacccaacacaugacaucauugcuuuaugugaauuugaaaauauaguaacaucaaaaaaagucauaauaccaacauacuuaagauccaucagugucagaaauaaagaucugaacacacuugaaaauauaacaaccaccgaauucaaaaaugccaucacaaaugcaaaaaucaucccuuacucaggauuacuguuagucaucacagugacugacaacaaaggagcauuuaaauacauaaagccacaaagucaauucauaguagaucuuggagcuuaccuagaaaaagaaaguauauauuauguuacaacaaauuggaagcacacagcuacacgauuugcaaucaaacccauggaagauuaaggacuaguaauaaggaaacuguaugaaugucugugggcaggaagugaagagauccuucuguaaagguuuuuggaauuaugucugcugaauaauaaacuuuuuugaaauaauaaaucugguagaaaaaugagaucuaaaaaaaaaaaaaaaaaaaaaaaaaaaaaaaaaaaaaaaaaaaaaaaaaaaaaaaaaaaaaaaaugcaucccccccccccccccccccccccccccccccaaaggcucuuuucagagccaccagaauu

SEQ ID NO: 20110 - RNA, 1130 nt, Artificial Sequence; identical to SEQ ID NO: 9950
  mRNA product Design g-2 comprising derived and/or modified sequence from HRSV(Memphis-37)__AIY60638.1__M (opt1)

SEQ ID NO: 20111 - RNA, 1130 nt, Artificial Sequence; identical to SEQ ID NO: 9951
  mRNA product Design g-2 comprising derived and/or modified sequence from HRSV(Memphis-37)__AIY60638.1__M (opt2)

SEQ ID NO: 20112 - RNA, 1130 nt, Artificial Sequence; identical to SEQ ID NO: 9952
  mRNA product Design g-2 comprising derived and/or modified sequence from HRSV(Memphis-37)__AIY60638.1__M (opt3)

SEQ ID NO: 20113 - RNA, 1130 nt, Artificial Sequence; identical to SEQ ID NO: 9953
  mRNA product Design g-2 comprising derived and/or modified sequence from HRSV(Memphis-37)__AIY60638.1__M (opt4)

SEQ ID NO: 20114 - RNA, 1130 nt, Artificial Sequence; identical to SEQ ID NO: 9954
  mRNA product Design g-2 comprising derived and/or modified sequence from HRSV(Memphis-37)__AIY60638.1__M (opt5)

SEQ ID NO: 20115 - RNA, 1130 nt, Artificial Sequence
  mRNA product Design g-2 comprising derived and/or modified sequence from HRSV(Memphis-37)__AIY60638.1__M (opt6)
gggagaguccgcucagccagguugcagaagcggcuuagcguguguccuaaucuucucucugcguguagguaggccugugccgcaaacaagcuuaccauggaaacauauguaaacaaauuacacgaaggauccacuuacacagccgcaguacaauacaauguacuagaaaaagacgacgacccagcaucacuaacaauauggguacccauguuccaauccucaaugccagcagaccuccuaauaaaagaacuagcuaauguaaacauacucguaaaacaaauauccacaccaaaaggaccaucacuacgaguaaugauaaacuccagauccgcaguacuagcacaaaugccaucaaaauucacaauaugcgccaacguaucacuagacgaaagaucaaaauuagcauacgacguaacaacaccaugcgaaauaaaagcaugcucacucacaugcuuaaaaucaaaaaacaugcuaacaacaguaaaagaccuaacaaugaaaacacucaaccccacccacgacauaauugccuuaugcgaauuugaaaacauaguaacauccaaaaaaguaauaauaccaacauaccuaagauccauuucaguaagaaacaaagaccuaaacacacuagaaaacauaacaacaacagaauuuaaaaacgcaauaacaaacgcaaaaauaauaccauacucaggauuacuacuuguaauaacaguaacagacaacaaaggagcauucaaauacauaaaaccucaaucacaauuuauaguagaccuaggagcauacuuagaaaaagaaucaaucuauuacgucacuacaaacuggaaacacacagcaaccagauucgcaauaaaacccauggaagacuaaggacuaguaauaaggaaacuguaugaaugucugugggcaggaagugaagagauccuucuguaaagguuuuuggaauuaugucugcugaauaauaaacuuuuuugaaauaauaaaucugguagaaaaaugagaucuaaaaaaaaaaaaaaaaaaaaaaaaaaaaaaaaaaaaaaaaaaaaaaaaaaaaaaaaaaaaaaaaugcaucccccccccccccccccccccccccccccccaaaggcucuuuucagagccaccagaauu

SEQ ID NO: 20116 - RNA, 1130 nt, Artificial Sequence
  mRNA product Design g-2 comprising derived and/or modified sequence from HRSV(Memphis-37)__AIY60638.1__M (opt11)
gggagaguccgcucagccagguugcagaagcggcuuagcguguguccuaaucuucucucugcguguagguaggccugugccgcaaacaagcuuaccauggaaaccuacgucaacaaacuccacgaaggauccaccuacaccgccgccguccaauacaacguccuugaaaaagacgacgaccccgccucccucaccaucuggguccccauguuccaauccucaaugcccgccgaccuccuaaucaaagaacucgccaacgucaacauccucgucaaacaaaucuccacccccaaaggccccucccuccgagucaugaucaacucccgcuccgccguccucgcacaaaugcccuccaaauucaccaucugcgccaacguaucccucgacgaacgcuccaaacucgcauacgacguuaccacucccugcgaaaucaaagccugcucacucaccugccucaaauccaaaaacaugcucaccaccgucaaagaccucaccaugaaaacccuaaaccccacccacgacaucaucgcccucugcgaauuugaaaacauagucaccuccaaaaaaguaaucauccccaccuaccuccgcuccaucuccguccgcaacaaagaccucaacacacucgaaaacaucacaaccaccgaauuuaaaaacgccaucaccaacgccaaaaucaucccauacuccggccuccuccuagucaucaccgucaccgacaacaaaggcgccuucaaguacaucaaaccacaaucccaauucaucgucgaccucggcgccuaccucgaaaaagaauccaucuacuacguaaccaccaacuggaaacacaccgccacccgcuucgccaucaaacccauggaagacuaaggacuaguaauaaggaaacuguaugaaugucugugggcaggaagugaagagauccuucuguaaagguuuuuggaauuaugucugcugaauaauaaacuuuuuugaaauaauaaaucugguagaaaaaugagaucuaaaaaaaaaaaaaaaaaaaaaaaaaaaaaaaaaaaaaaaaaaaaaaaaaaaaaaaaaaaaaaaaugcaucccccccccccccccccccccccccccccccaaaggcucuuuucagagccaccagaauu

SEQ ID NO: 20117 - RNA, 1362 nt, Artificial Sequence
  mRNA product Design g-3 comprising derived and/or modified sequence from HRSV(Memphis-37)__AIY60638.1__M (wt)
gggagaguccgcucagccagguugcagaagcggcuuagcguguguccuaaucuucucucugcguguagguaggccugugccgcaaacaagcuuaccauggaaacauacgugaacaaacuucacgaaggcuccacauacacagcugcuguucaauacaauguccuagaaaaagacgaugacccugcaucacuuacaauaugggugcccauguuccaaucauccaugccagcagauuuacuuauaaaagaacuagcuaaugucaacauacuagugaaacaaauauccacacccaaaggaccuucauuaagagucaugauaaacucaagaagugcagugcuagcacaaaugcccagcaaauucacuauaugugccaauguguccuuggaugaaagaagcaagcuggcauaugauguaaccacacccugcgaaaucaaggcauguagucuaacaugccuaaaaucaaaaaauauguuaacuacaguuaaagaucucacuaugaaaacacucaacccaacacaugacaucauugcuuuaugugaauuugaaaauauaguaacaucaaaaaaagucauaauaccaacauacuuaagauccaucagugucagaaauaaagaucugaacacacuugaaaauauaacaaccaccgaauucaaaaaugccaucacaaaugcaaaaaucaucccuuacucaggauuacuguuagucaucacagugacugacaacaaaggagcauuuaaauacauaaagccacaaagucaauucauaguagaucuuggagcuuaccuagaaaaagaaaguauauauuauguuacaacaaauuggaagcacacagcuacacgauuugcaaucaaacccauggaagauuaaggacuagugaagggaacacccaaauuuaauucagccuuaagcacaauuaauuaagagugaaacguaauuguacaagcaguuggucacccaccauagggcaugaucaacaccgcaaccuuuccuuuuucccccagugauucugaaaaaccccucuucccuucagcuugcuuagauguuccaaauuuaguaagcuuaaggcggccuacagaagaaaaagaaaaaaaaggccacaaaaguucccucucacuuucaguaaauaaaauaaaagcagcaacagaaauaaagaaauaaaugaaauucaaaaugaaauaaauauuguguugugcagcauuaaaaaaucaauaaaaauuaaaaaugagcaagaucuaaaaaaaaaaaaaaaaaaaaaaaaaaaaaaaaaaaaaaaaaaaaaaaaaaaaaaaaaaaaaaaaugcaucccccccccccccccccccccccccccccccaaaggcucuuuucagagccaccagaauu

SEQ ID NO: 20118 - RNA, 1362 nt, Artificial Sequence; identical to SEQ ID NO: 9958
  mRNA product Design g-3 comprising derived and/or modified sequence from HRSV(Memphis-37)__AIY60638.1__M (opt1)

SEQ ID NO: 20119 - RNA, 1362 nt, Artificial Sequence; identical to SEQ ID NO: 9959
  mRNA product Design g-3 comprising derived and/or modified sequence from HRSV(Memphis-37)__AIY60638.1__M (opt2)

SEQ ID NO: 20120 - RNA, 1362 nt, Artificial Sequence; identical to SEQ ID NO: 9960
  mRNA product Design g-3 comprising derived and/or modified sequence from HRSV(Memphis-37)__AIY60638.1__M (opt3)

SEQ ID NO: 20121 - RNA, 1362 nt, Artificial Sequence; identical to SEQ ID NO: 9961
  mRNA product Design g-3 comprising derived and/or modified sequence from HRSV(Memphis-37)__AIY60638.1__M (opt4)

SEQ ID NO: 20122 - RNA, 1362 nt, Artificial Sequence; identical to SEQ ID NO: 9962
  mRNA product Design g-3 comprising derived and/or modified sequence from HRSV(Memphis-37)__AIY60638.1__M (opt5)

SEQ ID NO: 20123 - RNA, 1362 nt, Artificial Sequence
  mRNA product Design g-3 comprising derived and/or modified sequence from HRSV(Memphis-37)__AIY60638.1__M (opt6)
gggagaguccgcucagccagguugcagaagcggcuuagcguguguccuaaucuucucucugcguguagguaggccugugccgcaaacaagcuuaccauggaaacauauguaaacaaauuacacgaaggauccacuuacacagccgcaguacaauacaauguacuagaaaaagacgacgacccagcaucacuaacaauauggguacccauguuccaauccucaaugccagcagaccuccuaauaaaagaacuagcuaauguaaacauacucguaaaacaaauauccacaccaaaaggaccaucacuacgaguaaugauaaacuccagauccgcaguacuagcacaaaugccaucaaaauucacaauaugcgccaacguaucacuagacgaaagaucaaaauuagcauacgacguaacaacaccaugcgaaauaaaagcaugcucacucacaugcuuaaaaucaaaaaacaugcuaacaacaguaaaagaccuaacaaugaaaacacucaaccccacccacgacauaauugccuuaugcgaauuugaaaacauaguaacauccaaaaaaguaauaauaccaacauaccuaagauccauuucaguaagaaacaaagaccuaaacacacuagaaaacauaacaacaacagaauuuaaaaacgcaauaacaaacgcaaaaauaauaccauacucaggauuacuacuuguaauaacaguaacagacaacaaaggagcauucaaauacauaaaaccucaaucacaauuuauaguagaccuaggagcauacuuagaaaaagaaucaaucuauuacgucacuacaaacuggaaacacacagcaaccagauucgcaauaaaacccauggaagacuaaggacuagugaagggaacacccaaauuuaauucagccuuaagcacaauuaauuaagagugaaacguaauuguacaagcaguuggucacccaccauagggcaugaucaacaccgcaaccuuuccuuuuucccccagugauucugaaaaaccccucuucccuucagcuugcuuagauguuccaaauuuaguaagcuuaaggcggccuacagaagaaaaagaaaaaaaaggccacaaaaguucccucucacuuucaguaaauaaaauaaaagcagcaacagaaauaaagaaauaaaugaaauucaaaaugaaauaaauauuguguugugcagcauuaaaaaaucaauaaaaauuaaaaaugagcaagaucuaaaaaaaaaaaaaaaaaaaaaaaaaaaaaaaaaaaaaaaaaaaaaaaaaaaaaaaaaaaaaaaaugcaucccccccccccccccccccccccccccccccaaaggcucuuuucagagccaccagaauu

SEQ ID NO: 20124 - RNA, 1362 nt, Artificial Sequence
  mRNA product Design g-3 comprising derived and/or modified sequence from HRSV(Memphis-37)__AIY60638.1__M (opt11)
gggagaguccgcucagccagguugcagaagcggcuuagcguguguccuaaucuucucucugcguguagguaggccugugccgcaaacaagcuuaccauggaaaccuacgucaacaaacuccacgaaggauccaccuacaccgccgccguccaauacaacguccuugaaaaagacgacgaccccgccucccucaccaucuggguccccauguuccaauccucaaugcccgccgaccuccuaaucaaagaacucgccaacgucaacauccucgucaaacaaaucuccacccccaaaggccccucccuccgagucaugaucaacucccgcuccgccguccucgcacaaaugcccuccaaauucaccaucugcgccaacguaucccucgacgaacgcuccaaacucgcauacgacguuaccacucccugcgaaaucaaagccugcucacucaccugccucaaauccaaaaacaugcucaccaccgucaaagaccucaccaugaaaacccuaaaccccacccacgacaucaucgcccucugcgaauuugaaaacauagucaccuccaaaaaaguaaucauccccaccuaccuccgcuccaucuccguccgcaacaaagaccucaacacacucgaaaacaucacaaccaccgaauuuaaaaacgccaucaccaacgccaaaaucaucccauacuccggccuccuccuagucaucaccgucaccgacaacaaaggcgccuucaaguacaucaaaccacaaucccaauucaucgucgaccucggcgccuaccucgaaaaagaauccaucuacuacguaaccaccaacuggaaacacaccgccacccgcuucgccaucaaacccauggaagacuaaggacuagugaagggaacacccaaauuuaauucagccuuaagcacaauuaauuaagagugaaacguaauuguacaagcaguuggucacccaccauagggcaugaucaacaccgcaaccuuuccuuuuucccccagugauucugaaaaaccccucuucccuucagcuugcuuagauguuccaaauuuaguaagcuuaaggcggccuacagaagaaaaagaaaaaaaaggccacaaaaguucccucucacuuucaguaaauaaaauaaaagcagcaacagaaauaaagaaauaaaugaaauucaaaaugaaauaaauauuguguugugcagcauuaaaaaaucaauaaaaauuaaaaaugagcaagaucuaaaaaaaaaaaaaaaaaaaaaaaaaaaaaaaaaaaaaaaaaaaaaaaaaaaaaaaaaaaaaaaaugcaucccccccccccccccccccccccccccccccaaaggcucuuuucagagccaccagaauu

SEQ ID NO: 20125 - RNA, 1157 nt, Artificial Sequence
  mRNA product Design g-4 comprising derived and/or modified sequence from HRSV(Memphis-37)__AIY60638.1__M (wt)
gggagacuccugucgggcggaaguaggaggaguagaguuuaaaaacaguacucuuuuuccgguucgggacguaguugaagcaacgacaagccggauaaccgcucuugagacaggaagcuuaccauggaaacauacgugaacaaacuucacgaaggcuccacauacacagcugcuguucaauacaauguccuagaaaaagacgaugacccugcaucacuuacaauaugggugcccauguuccaaucauccaugccagcagauuuacuuauaaaagaacuagcuaaugucaacauacuagugaaacaaauauccacacccaaaggaccuucauuaagagucaugauaaacucaagaagugcagugcuagcacaaaugcccagcaaauucacuauaugugccaauguguccuuggaugaaagaagcaagcuggcauaugauguaaccacacccugcgaaaucaaggcauguagucuaacaugccuaaaaucaaaaaauauguuaacuacaguuaaagaucucacuaugaaaacacucaacccaacacaugacaucauugcuuuaugugaauuugaaaauauaguaacaucaaaaaaagucauaauaccaacauacuuaagauccaucagugucagaaauaaagaucugaacacacuugaaaauauaacaaccaccgaauucaaaaaugccaucacaaaugcaaaaaucaucccuuacucaggauuacuguuagucaucacagugacugacaacaaaggagcauuuaaauacauaaagccacaaagucaauucauaguagaucuuggagcuuaccuagaaaaagaaaguauauauuauguuacaacaaauuggaagcacacagcuacacgauuugcaaucaaacccauggaagauuaaggacuaguaauaaggaaacuguaugaaugucugugggcaggaagugaagagauccuucuguaaagguuuuuggaauuaugucugcugaauaauaaacuuuuuugaaauaauaaaucugguagaaaaaugagaucuaaaaaaaaaaaaaaaaaaaaaaaaaaaaaaaaaaaaaaaaaaaaaaaaaaaaaaaaaaaaaaaaugcaucccccccccccccccccccccccccccccccaaaggcucuuuucagagccaccagaauu

SEQ ID NO: 20126 - RNA, 1157 nt, Artificial Sequence; identical to SEQ ID NO: 9966
  mRNA product Design g-4 comprising derived and/or modified sequence from HRSV(Memphis-37)__AIY60638.1__M (opt1)

SEQ ID NO: 20127 - RNA, 1157 nt, Artificial Sequence; identical to SEQ ID NO: 9967
  mRNA product Design g-4 comprising derived and/or modified sequence from HRSV(Memphis-37)__AIY60638.1__M (opt2)

SEQ ID NO: 20128 - RNA, 1157 nt, Artificial Sequence; identical to SEQ ID NO: 9968
  mRNA product Design g-4 comprising derived and/or modified sequence from HRSV(Memphis-37)__AIY60638.1__M (opt3)

SEQ ID NO: 20129 - RNA, 1157 nt, Artificial Sequence; identical to SEQ ID NO: 9969
  mRNA product Design g-4 comprising derived and/or modified sequence from HRSV(Memphis-37)__AIY60638.1__M (opt4)

SEQ ID NO: 20130 - RNA, 1157 nt, Artificial Sequence; identical to SEQ ID NO: 9970
  mRNA product Design g-4 comprising derived and/or modified sequence from HRSV(Memphis-37)__AIY60638.1__M (opt5)

SEQ ID NO: 20131 - RNA, 1157 nt, Artificial Sequence
  mRNA product Design g-4 comprising derived and/or modified sequence from HRSV(Memphis-37)__AIY60638.1__M (opt6)
gggagacuccugucgggcggaaguaggaggaguagaguuuaaaaacaguacucuuuuuccgguucgggacguaguugaagcaacgacaagccggauaaccgcucuugagacaggaagcuuaccauggaaacauauguaaacaaauuacacgaaggauccacuuacacagccgcaguacaauacaauguacuagaaaaagacgacgacccagcaucacuaacaauauggguacccauguuccaauccucaaugccagcagaccuccuaauaaaagaacuagcuaauguaaacauacucguaaaacaaauauccacaccaaaaggaccaucacuacgaguaaugauaaacuccagauccgcaguacuagcacaaaugccaucaaaauucacaauaugcgccaacguaucacuagacgaaagaucaaaauuagcauacgacguaacaacaccaugcgaaauaaaagcaugcucacucacaugcuuaaaaucaaaaaacaugcuaacaacaguaaaagaccuaacaaugaaaacacucaaccccacccacgacauaauugccuuaugcgaauuugaaaacauaguaacauccaaaaaaguaauaauaccaacauaccuaagauccauuucaguaagaaacaaagaccuaaacacacuagaaaacauaacaacaacagaauuuaaaaacgcaauaacaaacgcaaaaauaauaccauacucaggauuacuacuuguaauaacaguaacagacaacaaaggagcauucaaauacauaaaaccucaaucacaauuuauaguagaccuaggagcauacuuagaaaaagaaucaaucuauuacgucacuacaaacuggaaacacacagcaaccagauucgcaauaaaacccauggaagacuaaggacuaguaauaaggaaacuguaugaaugucugugggcaggaagugaagagauccuucuguaaagguuuuuggaauuaugucugcugaauaauaaacuuuuuugaaauaauaaaucugguagaaaaaugagaucuaaaaaaaaaaaaaaaaaaaaaaaaaaaaaaaaaaaaaaaaaaaaaaaaaaaaaaaaaaaaaaaaugcaucccccccccccccccccccccccccccccccaaaggcucuuuucagagccaccagaauu

SEQ ID NO: 20132 - RNA, 1157 nt, Artificial Sequence
  mRNA product Design g-4 comprising derived and/or modified sequence from HRSV(Memphis-37)__AIY60638.1__M (opt11)
gggagacuccugucgggcggaaguaggaggaguagaguuuaaaaacaguacucuuuuuccgguucgggacguaguugaagcaacgacaagccggauaaccgcucuugagacaggaagcuuaccauggaaaccuacgucaacaaacuccacgaaggauccaccuacaccgccgccguccaauacaacguccuugaaaaagacgacgaccccgccucccucaccaucuggguccccauguuccaauccucaaugcccgccgaccuccuaaucaaagaacucgccaacgucaacauccucgucaaacaaaucuccacccccaaaggccccucccuccgagucaugaucaacucccgcuccgccguccucgcacaaaugcccuccaaauucaccaucugcgccaacguaucccucgacgaacgcuccaaacucgcauacgacguuaccacucccugcgaaaucaaagccugcucacucaccugccucaaauccaaaaacaugcucaccaccgucaaagaccucaccaugaaaacccuaaaccccacccacgacaucaucgcccucugcgaauuugaaaacauagucaccuccaaaaaaguaaucauccccaccuaccuccgcuccaucuccguccgcaacaaagaccucaacacacucgaaaacaucacaaccaccgaauuuaaaaacgccaucaccaacgccaaaaucaucccauacuccggccuccuccuagucaucaccgucaccgacaacaaaggcgccuucaaguacaucaaaccacaaucccaauucaucgucgaccucggcgccuaccucgaaaaagaauccaucuacuacguaaccaccaacuggaaacacaccgccacccgcuucgccaucaaacccauggaagacuaaggacuaguaauaaggaaacuguaugaaugucugugggcaggaagugaagagauccuucuguaaagguuuuuggaauuaugucugcugaauaauaaacuuuuuugaaauaauaaaucugguagaaaaaugagaucuaaaaaaaaaaaaaaaaaaaaaaaaaaaaaaaaaaaaaaaaaaaaaaaaaaaaaaaaaaaaaaaaugcaucccccccccccccccccccccccccccccccaaaggcucuuuucagagccaccagaauu

SEQ ID NO: 20133 - RNA, 1133 nt, Artificial Sequence
  mRNA product Design g-5 comprising derived and/or modified sequence from HRSV(Memphis-37)__AIY60638.1__M (wt)
gggagacccgugacccggaaguuguacggcuacgcgacuuucccucccacaaacccucgcgcccuuccuuuccuacuugggcccggcagaaagcuuaccauggaaacauacgugaacaaacuucacgaaggcuccacauacacagcugcuguucaauacaauguccuagaaaaagacgaugacccugcaucacuuacaauaugggugcccauguuccaaucauccaugccagcagauuuacuuauaaaagaacuagcuaaugucaacauacuagugaaacaaauauccacacccaaaggaccuucauuaagagucaugauaaacucaagaagugcagugcuagcacaaaugcccagcaaauucacuauaugugccaauguguccuuggaugaaagaagcaagcuggcauaugauguaaccacacccugcgaaaucaaggcauguagucuaacaugccuaaaaucaaaaaauauguuaacuacaguuaaagaucucacuaugaaaacacucaacccaacacaugacaucauugcuuuaugugaauuugaaaauauaguaacaucaaaaaaagucauaauaccaacauacuuaagauccaucagugucagaaauaaagaucugaacacacuugaaaauauaacaaccaccgaauucaaaaaugccaucacaaaugcaaaaaucaucccuuacucaggauuacuguuagucaucacagugacugacaacaaaggagcauuuaaauacauaaagccacaaagucaauucauaguagaucuuggagcuuaccuagaaaaagaaaguauauauuauguuacaacaaauuggaagcacacagcuacacgauuugcaaucaaacccauggaagauuaaggacuaguaauaaggaaacuguaugaaugucugugggcaggaagugaagagauccuucuguaaagguuuuuggaauuaugucugcugaauaauaaacuuuuuugaaauaauaaaucugguagaaaaaugagaucuaaaaaaaaaaaaaaaaaaaaaaaaaaaaaaaaaaaaaaaaaaaaaaaaaaaaaaaaaaaaaaaaugcaucccccccccccccccccccccccccccccccaaaggcucuuuucagagccaccagaauu

SEQ ID NO: 20134 - RNA, 1133 nt, Artificial Sequence; identical to SEQ ID NO: 9974
  mRNA product Design g-5 comprising derived and/or modified sequence from HRSV(Memphis-37)__AIY60638.1__M (opt1)

SEQ ID NO: 20135 - RNA, 1133 nt, Artificial Sequence; identical to SEQ ID NO: 9975
  mRNA product Design g-5 comprising derived and/or modified sequence from HRSV(Memphis-37)__AIY60638.1__M (opt2)

SEQ ID NO: 20136 - RNA, 1133 nt, Artificial Sequence; identical to SEQ ID NO: 9976
  mRNA product Design g-5 comprising derived and/or modified sequence from HRSV(Memphis-37)__AIY60638.1__M (opt3)

SEQ ID NO: 20137 - RNA, 1133 nt, Artificial Sequence; identical to SEQ ID NO: 9977
  mRNA product Design g-5 comprising derived and/or modified sequence from HRSV(Memphis-37)__AIY60638.1__M (opt4)

SEQ ID NO: 20138 - RNA, 1133 nt, Artificial Sequence; identical to SEQ ID NO: 9978
  mRNA product Design g-5 comprising derived and/or modified sequence from HRSV(Memphis-37)__AIY60638.1__M (opt5)

SEQ ID NO: 20139 - RNA, 1133 nt, Artificial Sequence
  mRNA product Design g-5 comprising derived and/or modified sequence from HRSV(Memphis-37)__AIY60638.1__M (opt6)
gggagacccgugacccggaaguuguacggcuacgcgacuuucccucccacaaacccucgcgcccuuccuuuccuacuugggcccggcagaaagcuuaccauggaaacauauguaaacaaauuacacgaaggauccacuuacacagccgcaguacaauacaauguacuagaaaaagacgacgacccagcaucacuaacaauauggguacccauguuccaauccucaaugccagcagaccuccuaauaaaagaacuagcuaauguaaacauacucguaaaacaaauauccacaccaaaaggaccaucacuacgaguaaugauaaacuccagauccgcaguacuagcacaaaugccaucaaaauucacaauaugcgccaacguaucacuagacgaaagaucaaaauuagcauacgacguaacaacaccaugcgaaauaaaagcaugcucacucacaugcuuaaaaucaaaaaacaugcuaacaacaguaaaagaccuaacaaugaaaacacucaaccccacccacgacauaauugccuuaugcgaauuugaaaacauaguaacauccaaaaaaguaauaauaccaacauaccuaagauccauuucaguaagaaacaaagaccuaaacacacuagaaaacauaacaacaacagaauuuaaaaacgcaauaacaaacgcaaaaauaauaccauacucaggauuacuacuuguaauaacaguaacagacaacaaaggagcauucaaauacauaaaaccucaaucacaauuuauaguagaccuaggagcauacuuagaaaaagaaucaaucuauuacgucacuacaaacuggaaacacacagcaaccagauucgcaauaaaacccauggaagacuaaggacuaguaauaaggaaacuguaugaaugucugugggcaggaagugaagagauccuucuguaaagguuuuuggaauuaugucugcugaauaauaaacuuuuuugaaauaauaaaucugguagaaaaaugagaucuaaaaaaaaaaaaaaaaaaaaaaaaaaaaaaaaaaaaaaaaaaaaaaaaaaaaaaaaaaaaaaaaugcaucccccccccccccccccccccccccccccccaaaggcucuuuucagagccaccagaauu

SEQ ID NO: 20140 - RNA, 1133 nt, Artificial Sequence
  mRNA product Design g-5 comprising derived and/or modified sequence from HRSV(Memphis-37)__AIY60638.1__M (opt11)
gggagacccgugacccggaaguuguacggcuacgcgacuuucccucccacaaacccucgcgcccuuccuuuccuacuugggcccggcagaaagcuuaccauggaaaccuacgucaacaaacuccacgaaggauccaccuacaccgccgccguccaauacaacguccuugaaaaagacgacgaccccgccucccucaccaucuggguccccauguuccaauccucaaugcccgccgaccuccuaaucaaagaacucgccaacgucaacauccucgucaaacaaaucuccacccccaaaggccccucccuccgagucaugaucaacucccgcuccgccguccucgcacaaaugcccuccaaauucaccaucugcgccaacguaucccucgacgaacgcuccaaacucgcauacgacguuaccacucccugcgaaaucaaagccugcucacucaccugccucaaauccaaaaacaugcucaccaccgucaaagaccucaccaugaaaacccuaaaccccacccacgacaucaucgcccucugcgaauuugaaaacauagucaccuccaaaaaaguaaucauccccaccuaccuccgcuccaucuccguccgcaacaaagaccucaacacacucgaaaacaucacaaccaccgaauuuaaaaacgccaucaccaacgccaaaaucaucccauacuccggccuccuccuagucaucaccgucaccgacaacaaaggcgccuucaaguacaucaaaccacaaucccaauucaucgucgaccucggcgccuaccucgaaaaagaauccaucuacuacguaaccaccaacuggaaacacaccgccacccgcuucgccaucaaacccauggaagacuaaggacuaguaauaaggaaacuguaugaaugucugugggcaggaagugaagagauccuucuguaaagguuuuuggaauuaugucugcugaauaauaaacuuuuuugaaauaauaaaucugguagaaaaaugagaucuaaaaaaaaaaaaaaaaaaaaaaaaaaaaaaaaaaaaaaaaaaaaaaaaaaaaaaaaaaaaaaaaugcaucccccccccccccccccccccccccccccccaaaggcucuuuucagagccaccagaauu

SEQ ID NO: 20141 - RNA, 1149 nt, Artificial Sequence
  mRNA product Design h-1 comprising derived and/or modified sequence from HRSV(Memphis-37)__AIY60638.1__M (wt)
gggagacccgugacccggaaguuguacggcuacgcgacuuucccucccacaaacccucgcgcccuuccuuuccuacuugggcccggcagaaagcuuaccauggaaacauacgugaacaaacuucacgaaggcuccacauacacagcugcuguucaauacaauguccuagaaaaagacgaugacccugcaucacuuacaauaugggugcccauguuccaaucauccaugccagcagauuuacuuauaaaagaacuagcuaaugucaacauacuagugaaacaaauauccacacccaaaggaccuucauuaagagucaugauaaacucaagaagugcagugcuagcacaaaugcccagcaaauucacuauaugugccaauguguccuuggaugaaagaagcaagcuggcauaugauguaaccacacccugcgaaaucaaggcauguagucuaacaugccuaaaaucaaaaaauauguuaacuacaguuaaagaucucacuaugaaaacacucaacccaacacaugacaucauugcuuuaugugaauuugaaaauauaguaacaucaaaaaaagucauaauaccaacauacuuaagauccaucagugucagaaauaaagaucugaacacacuugaaaauauaacaaccaccgaauucaaaaaugccaucacaaaugcaaaaaucaucccuuacucaggauuacuguuagucaucacagugacugacaacaaaggagcauuuaaauacauaaagccacaaagucaauucauaguagaucuuggagcuuaccuagaaaaagaaaguauauauuauguuacaacaaauuggaagcacacagcuacacgauuugcaaucaaacccauggaagauuaaggacuaguacuggcugcaucucccuuuccucuguccuccauccuucucccaggauggugaagggggaccugguacccagugauccccaccccaggauccuaaaucaugacuuaccugcuaauaaaaacucauuggaaaagugagaagaucuaaaaaaaaaaaaaaaaaaaaaaaaaaaaaaaaaaaaaaaaaaaaaaaaaaaaaaaaaaaaaaaaugcaucccccccccccccccccccccccccccccccaaaggcucuuuucagagccaccagaauu

SEQ ID NO: 20142 - RNA, 1149 nt, Artificial Sequence; identical to SEQ ID NO: 9982
  mRNA product Design h-1 comprising derived and/or modified sequence from HRSV(Memphis-37)__AIY60638.1__M (opt1)

SEQ ID NO: 20143 - RNA, 1149 nt, Artificial Sequence; identical to SEQ ID NO: 9983
  mRNA product Design h-1 comprising derived and/or modified sequence from HRSV(Memphis-37)__AIY60638.1__M (opt2)

SEQ ID NO: 20144 - RNA, 1149 nt, Artificial Sequence; identical to SEQ ID NO: 9984
  mRNA product Design h-1 comprising derived and/or modified sequence from HRSV(Memphis-37)__AIY60638.1__M (opt3)

SEQ ID NO: 20145 - RNA, 1149 nt, Artificial Sequence; identical to SEQ ID NO: 9985
  mRNA product Design h-1 comprising derived and/or modified sequence from HRSV(Memphis-37)__AIY60638.1__M (opt4)

SEQ ID NO: 20146 - RNA, 1149 nt, Artificial Sequence; identical to SEQ ID NO: 9986
  mRNA product Design h-1 comprising derived and/or modified sequence from HRSV(Memphis-37)__AIY60638.1__M (opt5)

SEQ ID NO: 20147 - RNA, 1149 nt, Artificial Sequence
  mRNA product Design h-1 comprising derived and/or modified sequence from HRSV(Memphis-37)__AIY60638.1__M (opt6)
gggagacccgugacccggaaguuguacggcuacgcgacuuucccucccacaaacccucgcgcccuuccuuuccuacuugggcccggcagaaagcuuaccauggaaacauauguaaacaaauuacacgaaggauccacuuacacagccgcaguacaauacaauguacuagaaaaagacgacgacccagcaucacuaacaauauggguacccauguuccaauccucaaugccagcagaccuccuaauaaaagaacuagcuaauguaaacauacucguaaaacaaauauccacaccaaaaggaccaucacuacgaguaaugauaaacuccagauccgcaguacuagcacaaaugccaucaaaauucacaauaugcgccaacguaucacuagacgaaagaucaaaauuagcauacgacguaacaacaccaugcgaaauaaaagcaugcucacucacaugcuuaaaaucaaaaaacaugcuaacaacaguaaaagaccuaacaaugaaaacacucaaccccacccacgacauaauugccuuaugcgaauuugaaaacauaguaacauccaaaaaaguaauaauaccaacauaccuaagauccauuucaguaagaaacaaagaccuaaacacacuagaaaacauaacaacaacagaauuuaaaaacgcaauaacaaacgcaaaaauaauaccauacucaggauuacuacuuguaauaacaguaacagacaacaaaggagcauucaaauacauaaaaccucaaucacaauuuauaguagaccuaggagcauacuuagaaaaagaaucaaucuauuacgucacuacaaacuggaaacacacagcaaccagauucgcaauaaaacccauggaagacuaaggacuaguacuggcugcaucucccuuuccucuguccuccauccuucucccaggauggugaagggggaccugguacccagugauccccaccccaggauccuaaaucaugacuuaccugcuaauaaaaacucauuggaaaagugagaagaucuaaaaaaaaaaaaaaaaaaaaaaaaaaaaaaaaaaaaaaaaaaaaaaaaaaaaaaaaaaaaaaaaugcaucccccccccccccccccccccccccccccccaaaggcucuuuucagagccaccagaauu

SEQ ID NO: 20148 - RNA, 1149 nt, Artificial Sequence
  mRNA product Design h-1 comprising derived and/or modified sequence from HRSV(Memphis-37)__AIY60638.1__M (opt11)
gggagacccgugacccggaaguuguacggcuacgcgacuuucccucccacaaacccucgcgcccuuccuuuccuacuugggcccggcagaaagcuuaccauggaaaccuacgucaacaaacuccacgaaggauccaccuacaccgccgccguccaauacaacguccuugaaaaagacgacgaccccgccucccucaccaucuggguccccauguuccaauccucaaugcccgccgaccuccuaaucaaagaacucgccaacgucaacauccucgucaaacaaaucuccacccccaaaggccccucccuccgagucaugaucaacucccgcuccgccguccucgcacaaaugcccuccaaauucaccaucugcgccaacguaucccucgacgaacgcuccaaacucgcauacgacguuaccacucccugcgaaaucaaagccugcucacucaccugccucaaauccaaaaacaugcucaccaccgucaaagaccucaccaugaaaacccuaaaccccacccacgacaucaucgcccucugcgaauuugaaaacauagucaccuccaaaaaaguaaucauccccaccuaccuccgcuccaucuccguccgcaacaaagaccucaacacacucgaaaacaucacaaccaccgaauuuaaaaacgccaucaccaacgccaaaaucaucccauacuccggccuccuccuagucaucaccgucaccgacaacaaaggcgccuucaaguacaucaaaccacaaucccaauucaucgucgaccucggcgccuaccucgaaaaagaauccaucuacuacguaaccaccaacuggaaacacaccgccacccgcuucgccaucaaacccauggaagacuaaggacuaguacuggcugcaucucccuuuccucuguccuccauccuucucccaggauggugaagggggaccugguacccagugauccccaccccaggauccuaaaucaugacuuaccugcuaauaaaaacucauuggaaaagugagaagaucuaaaaaaaaaaaaaaaaaaaaaaaaaaaaaaaaaaaaaaaaaaaaaaaaaaaaaaaaaaaaaaaaugcaucccccccccccccccccccccccccccccccaaaggcucuuuucagagccaccagaauu

SEQ ID NO: 20149 - RNA, 1365 nt, Artificial Sequence
  mRNA product Design h-2 comprising derived and/or modified sequence from HRSV(Memphis-37)__AIY60638.1__M (wt)
gggagacccgugacccggaaguuguacggcuacgcgacuuucccucccacaaacccucgcgcccuuccuuuccuacuugggcccggcagaaagcuuaccauggaaacauacgugaacaaacuucacgaaggcuccacauacacagcugcuguucaauacaauguccuagaaaaagacgaugacccugcaucacuuacaauaugggugcccauguuccaaucauccaugccagcagauuuacuuauaaaagaacuagcuaaugucaacauacuagugaaacaaauauccacacccaaaggaccuucauuaagagucaugauaaacucaagaagugcagugcuagcacaaaugcccagcaaauucacuauaugugccaauguguccuuggaugaaagaagcaagcuggcauaugauguaaccacacccugcgaaaucaaggcauguagucuaacaugccuaaaaucaaaaaauauguuaacuacaguuaaagaucucacuaugaaaacacucaacccaacacaugacaucauugcuuuaugugaauuugaaaauauaguaacaucaaaaaaagucauaauaccaacauacuuaagauccaucagugucagaaauaaagaucugaacacacuugaaaauauaacaaccaccgaauucaaaaaugccaucacaaaugcaaaaaucaucccuuacucaggauuacuguuagucaucacagugacugacaacaaaggagcauuuaaauacauaaagccacaaagucaauucauaguagaucuuggagcuuaccuagaaaaagaaaguauauauuauguuacaacaaauuggaagcacacagcuacacgauuugcaaucaaacccauggaagauuaaggacuagugaagggaacacccaaauuuaauucagccuuaagcacaauuaauuaagagugaaacguaauuguacaagcaguuggucacccaccauagggcaugaucaacaccgcaaccuuuccuuuuucccccagugauucugaaaaaccccucuucccuucagcuugcuuagauguuccaaauuuaguaagcuuaaggcggccuacagaagaaaaagaaaaaaaaggccacaaaaguucccucucacuuucaguaaauaaaauaaaagcagcaacagaaauaaagaaauaaaugaaauucaaaaugaaauaaauauuguguugugcagcauuaaaaaaucaauaaaaauuaaaaaugagcaagaucuaaaaaaaaaaaaaaaaaaaaaaaaaaaaaaaaaaaaaaaaaaaaaaaaaaaaaaaaaaaaaaaaugcaucccccccccccccccccccccccccccccccaaaggcucuuuucagagccaccagaauu

SEQ ID NO: 20150 - RNA, 1365 nt, Artificial Sequence; identical to SEQ ID NO: 9990
  mRNA product Design h-2 comprising derived and/or modified sequence from HRSV(Memphis-37)__AIY60638.1__M (opt1)

SEQ ID NO: 20151 - RNA, 1365 nt, Artificial Sequence; identical to SEQ ID NO: 9991
  mRNA product Design h-2 comprising derived and/or modified sequence from HRSV(Memphis-37)__AIY60638.1__M (opt2)

SEQ ID NO: 20152 - RNA, 1365 nt, Artificial Sequence; identical to SEQ ID NO: 9992
  mRNA product Design h-2 comprising derived and/or modified sequence from HRSV(Memphis-37)__AIY60638.1__M (opt3)

SEQ ID NO: 20153 - RNA, 1365 nt, Artificial Sequence; identical to SEQ ID NO: 9993
  mRNA product Design h-2 comprising derived and/or modified sequence from HRSV(Memphis-37)__AIY60638.1__M (opt4)

SEQ ID NO: 20154 - RNA, 1365 nt, Artificial Sequence; identical to SEQ ID NO: 9994
  mRNA product Design h-2 comprising derived and/or modified sequence from HRSV(Memphis-37)__AIY60638.1__M (opt5)

SEQ ID NO: 20155 - RNA, 1365 nt, Artificial Sequence
  mRNA product Design h-2 comprising derived and/or modified sequence from HRSV(Memphis-37)__AIY60638.1__M (opt6)
gggagacccgugacccggaaguuguacggcuacgcgacuuucccucccacaaacccucgcgcccuuccuuuccuacuugggcccggcagaaagcuuaccauggaaacauauguaaacaaauuacacgaaggauccacuuacacagccgcaguacaauacaauguacuagaaaaagacgacgacccagcaucacuaacaauauggguacccauguuccaauccucaaugccagcagaccuccuaauaaaagaacuagcuaauguaaacauacucguaaaacaaauauccacaccaaaaggaccaucacuacgaguaaugauaaacuccagauccgcaguacuagcacaaaugccaucaaaauucacaauaugcgccaacguaucacuagacgaaagaucaaaauuagcauacgacguaacaacaccaugcgaaauaaaagcaugcucacucacaugcuuaaaaucaaaaaacaugcuaacaacaguaaaagaccuaacaaugaaaacacucaaccccacccacgacauaauugccuuaugcgaauuugaaaacauaguaacauccaaaaaaguaauaauaccaacauaccuaagauccauuucaguaagaaacaaagaccuaaacacacuagaaaacauaacaacaacagaauuuaaaaacgcaauaacaaacgcaaaaauaauaccauacucaggauuacuacuuguaauaacaguaacagacaacaaaggagcauucaaauacauaaaaccucaaucacaauuuauaguagaccuaggagcauacuuagaaaaagaaucaaucuauuacgucacuacaaacuggaaacacacagcaaccagauucgcaauaaaacccauggaagacuaaggacuagugaagggaacacccaaauuuaauucagccuuaagcacaauuaauuaagagugaaacguaauuguacaagcaguuggucacccaccauagggcaugaucaacaccgcaaccuuuccuuuuucccccagugauucugaaaaaccccucuucccuucagcuugcuuagauguuccaaauuuaguaagcuuaaggcggccuacagaagaaaaagaaaaaaaaggccacaaaaguucccucucacuuucaguaaauaaaauaaaagcagcaacagaaauaaagaaauaaaugaaauucaaaaugaaauaaauauuguguugugcagcauuaaaaaaucaauaaaaauuaaaaaugagcaagaucuaaaaaaaaaaaaaaaaaaaaaaaaaaaaaaaaaaaaaaaaaaaaaaaaaaaaaaaaaaaaaaaaugcaucccccccccccccccccccccccccccccccaaaggcucuuuucagagccaccagaauu

SEQ ID NO: 20156 - RNA, 1365 nt, Artificial Sequence
  mRNA product Design h-2 comprising derived and/or modified sequence from HRSV(Memphis-37)__AIY60638.1__M (opt11)
gggagacccgugacccggaaguuguacggcuacgcgacuuucccucccacaaacccucgcgcccuuccuuuccuacuugggcccggcagaaagcuuaccauggaaaccuacgucaacaaacuccacgaaggauccaccuacaccgccgccguccaauacaacguccuugaaaaagacgacgaccccgccucccucaccaucuggguccccauguuccaauccucaaugcccgccgaccuccuaaucaaagaacucgccaacgucaacauccucgucaaacaaaucuccacccccaaaggccccucccuccgagucaugaucaacucccgcuccgccguccucgcacaaaugcccuccaaauucaccaucugcgccaacguaucccucgacgaacgcuccaaacucgcauacgacguuaccacucccugcgaaaucaaagccugcucacucaccugccucaaauccaaaaacaugcucaccaccgucaaagaccucaccaugaaaacccuaaaccccacccacgacaucaucgcccucugcgaauuugaaaacauagucaccuccaaaaaaguaaucauccccaccuaccuccgcuccaucuccguccgcaacaaagaccucaacacacucgaaaacaucacaaccaccgaauuuaaaaacgccaucaccaacgccaaaaucaucccauacuccggccuccuccuagucaucaccgucaccgacaacaaaggcgccuucaaguacaucaaaccacaaucccaauucaucgucgaccucggcgccuaccucgaaaaagaauccaucuacuacguaaccaccaacuggaaacacaccgccacccgcuucgccaucaaacccauggaagacuaaggacuagugaagggaacacccaaauuuaauucagccuuaagcacaauuaauuaagagugaaacguaauuguacaagcaguuggucacccaccauagggcaugaucaacaccgcaaccuuuccuuuuucccccagugauucugaaaaaccccucuucccuucagcuugcuuagauguuccaaauuuaguaagcuuaaggcggccuacagaagaaaaagaaaaaaaaggccacaaaaguucccucucacuuucaguaaauaaaauaaaagcagcaacagaaauaaagaaauaaaugaaauucaaaaugaaauaaauauuguguugugcagcauuaaaaaaucaauaaaaauuaaaaaugagcaagaucuaaaaaaaaaaaaaaaaaaaaaaaaaaaaaaaaaaaaaaaaaaaaaaaaaaaaaaaaaaaaaaaaugcaucccccccccccccccccccccccccccccccaaaggcucuuuucagagccaccagaauu

SEQ ID NO: 20157 - RNA, 1145 nt, Artificial Sequence
  mRNA product Design h-3 comprising derived and/or modified sequence from HRSV(Memphis-37)__AIY60638.1__M (wt)
gggagacccgugacccggaaguuguacggcuacgcgacuuucccucccacaaacccucgcgcccuuccuuuccuacuugggcccggcagaaagcuuaccauggaaacauacgugaacaaacuucacgaaggcuccacauacacagcugcuguucaauacaauguccuagaaaaagacgaugacccugcaucacuuacaauaugggugcccauguuccaaucauccaugccagcagauuuacuuauaaaagaacuagcuaaugucaacauacuagugaaacaaauauccacacccaaaggaccuucauuaagagucaugauaaacucaagaagugcagugcuagcacaaaugcccagcaaauucacuauaugugccaauguguccuuggaugaaagaagcaagcuggcauaugauguaaccacacccugcgaaaucaaggcauguagucuaacaugccuaaaaucaaaaaauauguuaacuacaguuaaagaucucacuaugaaaacacucaacccaacacaugacaucauugcuuuaugugaauuugaaaauauaguaacaucaaaaaaagucauaauaccaacauacuuaagauccaucagugucagaaauaaagaucugaacacacuugaaaauauaacaaccaccgaauucaaaaaugccaucacaaaugcaaaaaucaucccuuacucaggauuacuguuagucaucacagugacugacaacaaaggagcauuuaaauacauaaagccacaaagucaauucauaguagaucuuggagcuuaccuagaaaaagaaaguauauauuauguuacaacaaauuggaagcacacagcuacacgauuugcaaucaaacccauggaagauuaaggacuaguggaagcauuuuccuggcugauuaaaagaaauuacucagcuauggucaucuguuccuguuagaaggcuaugcagcauauuauauacuaugcgcauguuaugaaaugcauaauaaaaaauuuuaaaaaaucuaaaagaucuaaaaaaaaaaaaaaaaaaaaaaaaaaaaaaaaaaaaaaaaaaaaaaaaaaaaaaaaaaaaaaaaugcaucccccccccccccccccccccccccccccccaaaggcucuuuucagagccaccagaauu

SEQ ID NO: 20158 - RNA, 1145 nt, Artificial Sequence; identical to SEQ ID NO: 9998
  mRNA product Design h-3 comprising derived and/or modified sequence from HRSV(Memphis-37)__AIY60638.1__M (opt1)

SEQ ID NO: 20159 - RNA, 1145 nt, Artificial Sequence; identical to SEQ ID NO: 9999
  mRNA product Design h-3 comprising derived and/or modified sequence from HRSV(Memphis-37)__AIY60638.1__M (opt2)

SEQ ID NO: 20160 - RNA, 1145 nt, Artificial Sequence; identical to SEQ ID NO: 10000
  mRNA product Design h-3 comprising derived and/or modified sequence from HRSV(Memphis-37)__AIY60638.1__M (opt3)

SEQ ID NO: 20161 - RNA, 1145 nt, Artificial Sequence; identical to SEQ ID NO: 10001
  mRNA product Design h-3 comprising derived and/or modified sequence from HRSV(Memphis-37)__AIY60638.1__M (opt4)

SEQ ID NO: 20162 - RNA, 1145 nt, Artificial Sequence; identical to SEQ ID NO: 10002
  mRNA product Design h-3 comprising derived and/or modified sequence from HRSV(Memphis-37)__AIY60638.1__M (opt5)

SEQ ID NO: 20163 - RNA, 1145 nt, Artificial Sequence
  mRNA product Design h-3 comprising derived and/or modified sequence from HRSV(Memphis-37)__AIY60638.1__M (opt6)
gggagacccgugacccggaaguuguacggcuacgcgacuuucccucccacaaacccucgcgcccuuccuuuccuacuugggcccggcagaaagcuuaccauggaaacauauguaaacaaauuacacgaaggauccacuuacacagccgcaguacaauacaauguacuagaaaaagacgacgacccagcaucacuaacaauauggguacccauguuccaauccucaaugccagcagaccuccuaauaaaagaacuagcuaauguaaacauacucguaaaacaaauauccacaccaaaaggaccaucacuacgaguaaugauaaacuccagauccgcaguacuagcacaaaugccaucaaaauucacaauaugcgccaacguaucacuagacgaaagaucaaaauuagcauacgacguaacaacaccaugcgaaauaaaagcaugcucacucacaugcuuaaaaucaaaaaacaugcuaacaacaguaaaagaccuaacaaugaaaacacucaaccccacccacgacauaauugccuuaugcgaauuugaaaacauaguaacauccaaaaaaguaauaauaccaacauaccuaagauccauuucaguaagaaacaaagaccuaaacacacuagaaaacauaacaacaacagaauuuaaaaacgcaauaacaaacgcaaaaauaauaccauacucaggauuacuacuuguaauaacaguaacagacaacaaaggagcauucaaauacauaaaaccucaaucacaauuuauaguagaccuaggagcauacuuagaaaaagaaucaaucuauuacgucacuacaaacuggaaacacacagcaaccagauucgcaauaaaacccauggaagacuaaggacuaguggaagcauuuuccuggcugauuaaaagaaauuacucagcuauggucaucuguuccuguuagaaggcuaugcagcauauuauauacuaugcgcauguuaugaaaugcauaauaaaaaauuuuaaaaaaucuaaaagaucuaaaaaaaaaaaaaaaaaaaaaaaaaaaaaaaaaaaaaaaaaaaaaaaaaaaaaaaaaaaaaaaaugcaucccccccccccccccccccccccccccccccaaaggcucuuuucagagccaccagaauu

SEQ ID NO: 20164 - RNA, 1145 nt, Artificial Sequence
  mRNA product Design h-3 comprising derived and/or modified sequence from HRSV(Memphis-37)__AIY60638.1__M (opt11)
gggagacccgugacccggaaguuguacggcuacgcgacuuucccucccacaaacccucgcgcccuuccuuuccuacuugggcccggcagaaagcuuaccauggaaaccuacgucaacaaacuccacgaaggauccaccuacaccgccgccguccaauacaacguccuugaaaaagacgacgaccccgccucccucaccaucuggguccccauguuccaauccucaaugcccgccgaccuccuaaucaaagaacucgccaacgucaacauccucgucaaacaaaucuccacccccaaaggccccucccuccgagucaugaucaacucccgcuccgccguccucgcacaaaugcccuccaaauucaccaucugcgccaacguaucccucgacgaacgcuccaaacucgcauacgacguuaccacucccugcgaaaucaaagccugcucacucaccugccucaaauccaaaaacaugcucaccaccgucaaagaccucaccaugaaaacccuaaaccccacccacgacaucaucgcccucugcgaauuugaaaacauagucaccuccaaaaaaguaaucauccccaccuaccuccgcuccaucuccguccgcaacaaagaccucaacacacucgaaaacaucacaaccaccgaauuuaaaaacgccaucaccaacgccaaaaucaucccauacuccggccuccuccuagucaucaccgucaccgacaacaaaggcgccuucaaguacaucaaaccacaaucccaauucaucgucgaccucggcgccuaccucgaaaaagaauccaucuacuacguaaccaccaacuggaaacacaccgccacccgcuucgccaucaaacccauggaagacuaaggacuaguggaagcauuuuccuggcugauuaaaagaaauuacucagcuauggucaucuguuccuguuagaaggcuaugcagcauauuauauacuaugcgcauguuaugaaaugcauaauaaaaaauuuuaaaaaaucuaaaagaucuaaaaaaaaaaaaaaaaaaaaaaaaaaaaaaaaaaaaaaaaaaaaaaaaaaaaaaaaaaaaaaaaugcaucccccccccccccccccccccccccccccccaaaggcucuuuucagagccaccagaauu

SEQ ID NO: 20165 - RNA, 1208 nt, Artificial Sequence
  mRNA product Design h-4 comprising derived and/or modified sequence from HRSV(Memphis-37)__AIY60638.1__M (wt)
gggagagggcgcuuggcuugcaaggacccugagcugcggcauugaagcacacccaacccaacucgacugaagucagccucacugaaccggaucugagaaucuucucucucugggcuugccagggcucuccgaaccuagcuagcauccucuucaauuccaacuagaaagcuuaccauggaaacauacgugaacaaacuucacgaaggcuccacauacacagcugcuguucaauacaauguccuagaaaaagacgaugacccugcaucacuuacaauaugggugcccauguuccaaucauccaugccagcagauuuacuuauaaaagaacuagcuaaugucaacauacuagugaaacaaauauccacacccaaaggaccuucauuaagagucaugauaaacucaagaagugcagugcuagcacaaaugcccagcaaauucacuauaugugccaauguguccuuggaugaaagaagcaagcuggcauaugauguaaccacacccugcgaaaucaaggcauguagucuaacaugccuaaaaucaaaaaauauguuaacuacaguuaaagaucucacuaugaaaacacucaacccaacacaugacaucauugcuuuaugugaauuugaaaauauaguaacaucaaaaaaagucauaauaccaacauacuuaagauccaucagugucagaaauaaagaucugaacacacuugaaaauauaacaaccaccgaauucaaaaaugccaucacaaaugcaaaaaucaucccuuacucaggauuacuguuagucaucacagugacugacaacaaaggagcauuuaaauacauaaagccacaaagucaauucauaguagaucuuggagcuuaccuagaaaaagaaaguauauauuauguuacaacaaauuggaagcacacagcuacacgauuugcaaucaaacccauggaagauuaaggacuaguaauaaggaaacuguaugaaugucugugggcaggaagugaagagauccuucuguaaagguuuuuggaauuaugucugcugaauaauaaacuuuuuugaaauaauaaaucugguagaaaaaugagaucuaaaaaaaaaaaaaaaaaaaaaaaaaaaaaaaaaaaaaaaaaaaaaaaaaaaaaaaaaaaaaaaaugcaucccccccccccccccccccccccccccccccaaaggcucuuuucagagccaccagaauu

SEQ ID NO: 20166 - RNA, 1208 nt, Artificial Sequence; identical to SEQ ID NO: 10006
  mRNA product Design h-4 comprising derived and/or modified sequence from HRSV(Memphis-37)__AIY60638.1__M (opt1)

SEQ ID NO: 20167 - RNA, 1208 nt, Artificial Sequence; identical to SEQ ID NO: 10007
  mRNA product Design h-4 comprising derived and/or modified sequence from HRSV(Memphis-37)__AIY60638.1__M (opt2)

SEQ ID NO: 20168 - RNA, 1208 nt, Artificial Sequence; identical to SEQ ID NO: 10008
  mRNA product Design h-4 comprising derived and/or modified sequence from HRSV(Memphis-37)__AIY60638.1__M (opt3)

SEQ ID NO: 20169 - RNA, 1208 nt, Artificial Sequence; identical to SEQ ID NO: 10009
  mRNA product Design h-4 comprising derived and/or modified sequence from HRSV(Memphis-37)__AIY60638.1__M (opt4)

SEQ ID NO: 20170 - RNA, 1208 nt, Artificial Sequence; identical to SEQ ID NO: 10010
  mRNA product Design h-4 comprising derived and/or modified sequence from HRSV(Memphis-37)__AIY60638.1__M (opt5)

SEQ ID NO: 20171 - RNA, 1208 nt, Artificial Sequence
  mRNA product Design h-4 comprising derived and/or modified sequence from HRSV(Memphis-37)__AIY60638.1__M (opt6)
gggagagggcgcuuggcuugcaaggacccugagcugcggcauugaagcacacccaacccaacucgacugaagucagccucacugaaccggaucugagaaucuucucucucugggcuugccagggcucuccgaaccuagcuagcauccucuucaauuccaacuagaaagcuuaccauggaaacauauguaaacaaauuacacgaaggauccacuuacacagccgcaguacaauacaauguacuagaaaaagacgacgacccagcaucacuaacaauauggguacccauguuccaauccucaaugccagcagaccuccuaauaaaagaacuagcuaauguaaacauacucguaaaacaaauauccacaccaaaaggaccaucacuacgaguaaugauaaacuccagauccgcaguacuagcacaaaugccaucaaaauucacaauaugcgccaacguaucacuagacgaaagaucaaaauuagcauacgacguaacaacaccaugcgaaauaaaagcaugcucacucacaugcuuaaaaucaaaaaacaugcuaacaacaguaaaagaccuaacaaugaaaacacucaaccccacccacgacauaauugccuuaugcgaauuugaaaacauaguaacauccaaaaaaguaauaauaccaacauaccuaagauccauuucaguaagaaacaaagaccuaaacacacuagaaaacauaacaacaacagaauuuaaaaacgcaauaacaaacgcaaaaauaauaccauacucaggauuacuacuuguaauaacaguaacagacaacaaaggagcauucaaauacauaaaaccucaaucacaauuuauaguagaccuaggagcauacuuagaaaaagaaucaaucuauuacgucacuacaaacuggaaacacacagcaaccagauucgcaauaaaacccauggaagacuaaggacuaguaauaaggaaacuguaugaaugucugugggcaggaagugaagagauccuucuguaaagguuuuuggaauuaugucugcugaauaauaaacuuuuuugaaauaauaaaucugguagaaaaaugagaucuaaaaaaaaaaaaaaaaaaaaaaaaaaaaaaaaaaaaaaaaaaaaaaaaaaaaaaaaaaaaaaaaugcaucccccccccccccccccccccccccccccccaaaggcucuuuucagagccaccagaauu

SEQ ID NO: 20172 - RNA, 1208 nt, Artificial Sequence
  mRNA product Design h-4 comprising derived and/or modified sequence from HRSV(Memphis-37)__AIY60638.1__M (opt11)
gggagagggcgcuuggcuugcaaggacccugagcugcggcauugaagcacacccaacccaacucgacugaagucagccucacugaaccggaucugagaaucuucucucucugggcuugccagggcucuccgaaccuagcuagcauccucuucaauuccaacuagaaagcuuaccauggaaaccuacgucaacaaacuccacgaaggauccaccuacaccgccgccguccaauacaacguccuugaaaaagacgacgaccccgccucccucaccaucuggguccccauguuccaauccucaaugcccgccgaccuccuaaucaaagaacucgccaacgucaacauccucgucaaacaaaucuccacccccaaaggccccucccuccgagucaugaucaacucccgcuccgccguccucgcacaaaugcccuccaaauucaccaucugcgccaacguaucccucgacgaacgcuccaaacucgcauacgacguuaccacucccugcgaaaucaaagccugcucacucaccugccucaaauccaaaaacaugcucaccaccgucaaagaccucaccaugaaaacccuaaaccccacccacgacaucaucgcccucugcgaauuugaaaacauagucaccuccaaaaaaguaaucauccccaccuaccuccgcuccaucuccguccgcaacaaagaccucaacacacucgaaaacaucacaaccaccgaauuuaaaaacgccaucaccaacgccaaaaucaucccauacuccggccuccuccuagucaucaccgucaccgacaacaaaggcgccuucaaguacaucaaaccacaaucccaauucaucgucgaccucggcgccuaccucgaaaaagaauccaucuacuacguaaccaccaacuggaaacacaccgccacccgcuucgccaucaaacccauggaagacuaaggacuaguaauaaggaaacuguaugaaugucugugggcaggaagugaagagauccuucuguaaagguuuuuggaauuaugucugcugaauaauaaacuuuuuugaaauaauaaaucugguagaaaaaugagaucuaaaaaaaaaaaaaaaaaaaaaaaaaaaaaaaaaaaaaaaaaaaaaaaaaaaaaaaaaaaaaaaaugcaucccccccccccccccccccccccccccccccaaaggcucuuuucagagccaccagaauu

SEQ ID NO: 20173 - RNA, 1224 nt, Artificial Sequence
  mRNA product Design h-5 comprising derived and/or modified sequence from HRSV(Memphis-37)__AIY60638.1__M (wt)
gggagagggcgcuuggcuugcaaggacccugagcugcggcauugaagcacacccaacccaacucgacugaagucagccucacugaaccggaucugagaaucuucucucucugggcuugccagggcucuccgaaccuagcuagcauccucuucaauuccaacuagaaagcuuaccauggaaacauacgugaacaaacuucacgaaggcuccacauacacagcugcuguucaauacaauguccuagaaaaagacgaugacccugcaucacuuacaauaugggugcccauguuccaaucauccaugccagcagauuuacuuauaaaagaacuagcuaaugucaacauacuagugaaacaaauauccacacccaaaggaccuucauuaagagucaugauaaacucaagaagugcagugcuagcacaaaugcccagcaaauucacuauaugugccaauguguccuuggaugaaagaagcaagcuggcauaugauguaaccacacccugcgaaaucaaggcauguagucuaacaugccuaaaaucaaaaaauauguuaacuacaguuaaagaucucacuaugaaaacacucaacccaacacaugacaucauugcuuuaugugaauuugaaaauauaguaacaucaaaaaaagucauaauaccaacauacuuaagauccaucagugucagaaauaaagaucugaacacacuugaaaauauaacaaccaccgaauucaaaaaugccaucacaaaugcaaaaaucaucccuuacucaggauuacuguuagucaucacagugacugacaacaaaggagcauuuaaauacauaaagccacaaagucaauucauaguagaucuuggagcuuaccuagaaaaagaaaguauauauuauguuacaacaaauuggaagcacacagcuacacgauuugcaaucaaacccauggaagauuaaggacuaguacuggcugcaucucccuuuccucuguccuccauccuucucccaggauggugaagggggaccugguacccagugauccccaccccaggauccuaaaucaugacuuaccugcuaauaaaaacucauuggaaaagugagaagaucuaaaaaaaaaaaaaaaaaaaaaaaaaaaaaaaaaaaaaaaaaaaaaaaaaaaaaaaaaaaaaaaaugcaucccccccccccccccccccccccccccccccaaaggcucuuuucagagccaccagaauu

SEQ ID NO: 20174 - RNA, 1224 nt, Artificial Sequence; identical to SEQ ID NO: 10014
  mRNA product Design h-5 comprising derived and/or modified sequence from HRSV(Memphis-37)__AIY60638.1__M (opt1)

SEQ ID NO: 20175 - RNA, 1224 nt, Artificial Sequence; identical to SEQ ID NO: 10015
  mRNA product Design h-5 comprising derived and/or modified sequence from HRSV(Memphis-37)__AIY60638.1__M (opt2)

SEQ ID NO: 20176 - RNA, 1224 nt, Artificial Sequence; identical to SEQ ID NO: 10016
  mRNA product Design h-5 comprising derived and/or modified sequence from HRSV(Memphis-37)__AIY60638.1__M (opt3)

SEQ ID NO: 20177 - RNA, 1224 nt, Artificial Sequence; identical to SEQ ID NO: 10017
  mRNA product Design h-5 comprising derived and/or modified sequence from HRSV(Memphis-37)__AIY60638.1__M (opt4)

SEQ ID NO: 20178 - RNA, 1224 nt, Artificial Sequence; identical to SEQ ID NO: 10018
  mRNA product Design h-5 comprising derived and/or modified sequence from HRSV(Memphis-37)__AIY60638.1__M (opt5)

SEQ ID NO: 20179 - RNA, 1224 nt, Artificial Sequence
  mRNA product Design h-5 comprising derived and/or modified sequence from HRSV(Memphis-37)__AIY60638.1__M (opt6)
gggagagggcgcuuggcuugcaaggacccugagcugcggcauugaagcacacccaacccaacucgacugaagucagccucacugaaccggaucugagaaucuucucucucugggcuugccagggcucuccgaaccuagcuagcauccucuucaauuccaacuagaaagcuuaccauggaaacauauguaaacaaauuacacgaaggauccacuuacacagccgcaguacaauacaauguacuagaaaaagacgacgacccagcaucacuaacaauauggguacccauguuccaauccucaaugccagcagaccuccuaauaaaagaacuagcuaauguaaacauacucguaaaacaaauauccacaccaaaaggaccaucacuacgaguaaugauaaacuccagauccgcaguacuagcacaaaugccaucaaaauucacaauaugcgccaacguaucacuagacgaaagaucaaaauuagcauacgacguaacaacaccaugcgaaauaaaagcaugcucacucacaugcuuaaaaucaaaaaacaugcuaacaacaguaaaagaccuaacaaugaaaacacucaaccccacccacgacauaauugccuuaugcgaauuugaaaacauaguaacauccaaaaaaguaauaauaccaacauaccuaagauccauuucaguaagaaacaaagaccuaaacacacuagaaaacauaacaacaacagaauuuaaaaacgcaauaacaaacgcaaaaauaauaccauacucaggauuacuacuuguaauaacaguaacagacaacaaaggagcauucaaauacauaaaaccucaaucacaauuuauaguagaccuaggagcauacuuagaaaaagaaucaaucuauuacgucacuacaaacuggaaacacacagcaaccagauucgcaauaaaacccauggaagacuaaggacuaguacuggcugcaucucccuuuccucuguccuccauccuucucccaggauggugaagggggaccugguacccagugauccccaccccaggauccuaaaucaugacuuaccugcuaauaaaaacucauuggaaaagugagaagaucuaaaaaaaaaaaaaaaaaaaaaaaaaaaaaaaaaaaaaaaaaaaaaaaaaaaaaaaaaaaaaaaaugcaucccccccccccccccccccccccccccccccaaaggcucuuuucagagccaccagaauu

SEQ ID NO: 20180 - RNA, 1224 nt, Artificial Sequence
  mRNA product Design h-5 comprising derived and/or modified sequence from HRSV(Memphis-37)__AIY60638.1__M (opt11)
gggagagggcgcuuggcuugcaaggacccugagcugcggcauugaagcacacccaacccaacucgacugaagucagccucacugaaccggaucugagaaucuucucucucugggcuugccagggcucuccgaaccuagcuagcauccucuucaauuccaacuagaaagcuuaccauggaaaccuacgucaacaaacuccacgaaggauccaccuacaccgccgccguccaauacaacguccuugaaaaagacgacgaccccgccucccucaccaucuggguccccauguuccaauccucaaugcccgccgaccuccuaaucaaagaacucgccaacgucaacauccucgucaaacaaaucuccacccccaaaggccccucccuccgagucaugaucaacucccgcuccgccguccucgcacaaaugcccuccaaauucaccaucugcgccaacguaucccucgacgaacgcuccaaacucgcauacgacguuaccacucccugcgaaaucaaagccugcucacucaccugccucaaauccaaaaacaugcucaccaccgucaaagaccucaccaugaaaacccuaaaccccacccacgacaucaucgcccucugcgaauuugaaaacauagucaccuccaaaaaaguaaucauccccaccuaccuccgcuccaucuccguccgcaacaaagaccucaacacacucgaaaacaucacaaccaccgaauuuaaaaacgccaucaccaacgccaaaaucaucccauacuccggccuccuccuagucaucaccgucaccgacaacaaaggcgccuucaaguacaucaaaccacaaucccaauucaucgucgaccucggcgccuaccucgaaaaagaauccaucuacuacguaaccaccaacuggaaacacaccgccacccgcuucgccaucaaacccauggaagacuaaggacuaguacuggcugcaucucccuuuccucuguccuccauccuucucccaggauggugaagggggaccugguacccagugauccccaccccaggauccuaaaucaugacuuaccugcuaauaaaaacucauuggaaaagugagaagaucuaaaaaaaaaaaaaaaaaaaaaaaaaaaaaaaaaaaaaaaaaaaaaaaaaaaaaaaaaaaaaaaaugcaucccccccccccccccccccccccccccccccaaaggcucuuuucagagccaccagaauu

SEQ ID NO: 20181 - RNA, 1157 nt, Artificial Sequence
  mRNA product Design i-1 comprising derived and/or modified sequence from HRSV(Memphis-37)__AIY60638.1__M (wt)
gggagagggcgcuuggcuugcaaggacccugagcugcggcauugaagcacacccaacccaacucgacugaagucagccucacugaaccggaucugagaaucuucucucucugggcuugccagggcucuccgaaccuagcuagcauccucuucaauuccaacuagaaagcuuaccauggaaacauacgugaacaaacuucacgaaggcuccacauacacagcugcuguucaauacaauguccuagaaaaagacgaugacccugcaucacuuacaauaugggugcccauguuccaaucauccaugccagcagauuuacuuauaaaagaacuagcuaaugucaacauacuagugaaacaaauauccacacccaaaggaccuucauuaagagucaugauaaacucaagaagugcagugcuagcacaaaugcccagcaaauucacuauaugugccaauguguccuuggaugaaagaagcaagcuggcauaugauguaaccacacccugcgaaaucaaggcauguagucuaacaugccuaaaaucaaaaaauauguuaacuacaguuaaagaucucacuaugaaaacacucaacccaacacaugacaucauugcuuuaugugaauuugaaaauauaguaacaucaaaaaaagucauaauaccaacauacuuaagauccaucagugucagaaauaaagaucugaacacacuugaaaauauaacaaccaccgaauucaaaaaugccaucacaaaugcaaaaaucaucccuuacucaggauuacuguuagucaucacagugacugacaacaaaggagcauuuaaauacauaaagccacaaagucaauucauaguagaucuuggagcuuaccuagaaaaagaaaguauauauuauguuacaacaaauuggaagcacacagcuacacgauuugcaaucaaacccauggaagauuaaggacuaguguccaccugucccuccugggcugcuggauugucucguuuuccugccaaauaaacaggaucagcgcuuuacagaucuaaaaaaaaaaaaaaaaaaaaaaaaaaaaaaaaaaaaaaaaaaaaaaaaaaaaaaaaaaaaaaaaugcaucccccccccccccccccccccccccccccccaaaggcucuuuucagagccaccagaauu

SEQ ID NO: 20182 - RNA, 1157 nt, Artificial Sequence; identical to SEQ ID NO: 10022
  mRNA product Design i-1 comprising derived and/or modified sequence from HRSV(Memphis-37)__AIY60638.1__M (opt1)

SEQ ID NO: 20183 - RNA, 1157 nt, Artificial Sequence; identical to SEQ ID NO: 10023
  mRNA product Design i-1 comprising derived and/or modified sequence from HRSV(Memphis-37)__AIY60638.1__M (opt2)

SEQ ID NO: 20184 - RNA, 1157 nt, Artificial Sequence; identical to SEQ ID NO: 10024
  mRNA product Design i-1 comprising derived and/or modified sequence from HRSV(Memphis-37)__AIY60638.1__M (opt3)

SEQ ID NO: 20185 - RNA, 1157 nt, Artificial Sequence; identical to SEQ ID NO: 10025
  mRNA product Design i-1 comprising derived and/or modified sequence from HRSV(Memphis-37)__AIY60638.1__M (opt4)

SEQ ID NO: 20186 - RNA, 1157 nt, Artificial Sequence; identical to SEQ ID NO: 10026
  mRNA product Design i-1 comprising derived and/or modified sequence from HRSV(Memphis-37)__AIY60638.1__M (opt5)

SEQ ID NO: 20187 - RNA, 1157 nt, Artificial Sequence
  mRNA product Design i-1 comprising derived and/or modified sequence from HRSV(Memphis-37)__AIY60638.1__M (opt6)
gggagagggcgcuuggcuugcaaggacccugagcugcggcauugaagcacacccaacccaacucgacugaagucagccucacugaaccggaucugagaaucuucucucucugggcuugccagggcucuccgaaccuagcuagcauccucuucaauuccaacuagaaagcuuaccauggaaacauauguaaacaaauuacacgaaggauccacuuacacagccgcaguacaauacaauguacuagaaaaagacgacgacccagcaucacuaacaauauggguacccauguuccaauccucaaugccagcagaccuccuaauaaaagaacuagcuaauguaaacauacucguaaaacaaauauccacaccaaaaggaccaucacuacgaguaaugauaaacuccagauccgcaguacuagcacaaaugccaucaaaauucacaauaugcgccaacguaucacuagacgaaagaucaaaauuagcauacgacguaacaacaccaugcgaaauaaaagcaugcucacucacaugcuuaaaaucaaaaaacaugcuaacaacaguaaaagaccuaacaaugaaaacacucaaccccacccacgacauaauugccuuaugcgaauuugaaaacauaguaacauccaaaaaaguaauaauaccaacauaccuaagauccauuucaguaagaaacaaagaccuaaacacacuagaaaacauaacaacaacagaauuuaaaaacgcaauaacaaacgcaaaaauaauaccauacucaggauuacuacuuguaauaacaguaacagacaacaaaggagcauucaaauacauaaaaccucaaucacaauuuauaguagaccuaggagcauacuuagaaaaagaaucaaucuauuacgucacuacaaacuggaaacacacagcaaccagauucgcaauaaaacccauggaagacuaaggacuaguguccaccugucccuccugggcugcuggauugucucguuuuccugccaaauaaacaggaucagcgcuuuacagaucuaaaaaaaaaaaaaaaaaaaaaaaaaaaaaaaaaaaaaaaaaaaaaaaaaaaaaaaaaaaaaaaaugcaucccccccccccccccccccccccccccccccaaaggcucuuuucagagccaccagaauu

SEQ ID NO: 20188 - RNA, 1157 nt, Artificial Sequence
  mRNA product Design i-1 comprising derived and/or modified sequence from HRSV(Memphis-37)__AIY60638.1__M (opt11)
gggagagggcgcuuggcuugcaaggacccugagcugcggcauugaagcacacccaacccaacucgacugaagucagccucacugaaccggaucugagaaucuucucucucugggcuugccagggcucuccgaaccuagcuagcauccucuucaauuccaacuagaaagcuuaccauggaaaccuacgucaacaaacuccacgaaggauccaccuacaccgccgccguccaauacaacguccuugaaaaagacgacgaccccgccucccucaccaucuggguccccauguuccaauccucaaugcccgccgaccuccuaaucaaagaacucgccaacgucaacauccucgucaaacaaaucuccacccccaaaggccccucccuccgagucaugaucaacucccgcuccgccguccucgcacaaaugcccuccaaauucaccaucugcgccaacguaucccucgacgaacgcuccaaacucgcauacgacguuaccacucccugcgaaaucaaagccugcucacucaccugccucaaauccaaaaacaugcucaccaccgucaaagaccucaccaugaaaacccuaaaccccacccacgacaucaucgcccucugcgaauuugaaaacauagucaccuccaaaaaaguaaucauccccaccuaccuccgcuccaucuccguccgcaacaaagaccucaacacacucgaaaacaucacaaccaccgaauuuaaaaacgccaucaccaacgccaaaaucaucccauacuccggccuccuccuagucaucaccgucaccgacaacaaaggcgccuucaaguacaucaaaccacaaucccaauucaucgucgaccucggcgccuaccucgaaaaagaauccaucuacuacguaaccaccaacuggaaacacaccgccacccgcuucgccaucaaacccauggaagacuaaggacuaguguccaccugucccuccugggcugcuggauugucucguuuuccugccaaauaaacaggaucagcgcuuuacagaucuaaaaaaaaaaaaaaaaaaaaaaaaaaaaaaaaaaaaaaaaaaaaaaaaaaaaaaaaaaaaaaaaugcaucccccccccccccccccccccccccccccccaaaggcucuuuucagagccaccagaauu

SEQ ID NO: 20189 - RNA, 1157 nt, Artificial Sequence
  mRNA product Design i-2 comprising derived and/or modified sequence from HRSV(Memphis-37)__AIY60638.1__M (wt)
gggagaggcgcugccuacggagguggcagccaucuccuucucggcaucaagcuuaccauggaaacauacgugaacaaacuucacgaaggcuccacauacacagcugcuguucaauacaauguccuagaaaaagacgaugacccugcaucacuuacaauaugggugcccauguuccaaucauccaugccagcagauuuacuuauaaaagaacuagcuaaugucaacauacuagugaaacaaauauccacacccaaaggaccuucauuaagagucaugauaaacucaagaagugcagugcuagcacaaaugcccagcaaauucacuauaugugccaauguguccuuggaugaaagaagcaagcuggcauaugauguaaccacacccugcgaaaucaaggcauguagucuaacaugccuaaaaucaaaaaauauguuaacuacaguuaaagaucucacuaugaaaacacucaacccaacacaugacaucauugcuuuaugugaauuugaaaauauaguaacaucaaaaaaagucauaauaccaacauacuuaagauccaucagugucagaaauaaagaucugaacacacuugaaaauauaacaaccaccgaauucaaaaaugccaucacaaaugcaaaaaucaucccuuacucaggauuacuguuagucaucacagugacugacaacaaaggagcauuuaaauacauaaagccacaaagucaauucauaguagaucuuggagcuuaccuagaaaaagaaaguauauauuauguuacaacaaauuggaagcacacagcuacacgauuugcaaucaaacccauggaagauuaaggacuagugcaucacauuuaaaagcaucucagccuaccaugagaauaagagaaagaaaaugaagaucaauagcuuauucaucucuuuuucuuuuucguugguguaaagccaacacccugucuaaaaaacauaaauuucuuuaaucauuuugccucuuuucucugugcuucaauuaauaaaaaauggaaagaaccuagaucuaaaaaaaaaaaaaaaaaaaaaaaaaaaaaaaaaaaaaaaaaaaaaaaaaaaaaaaaaaaaaaaaugcaucccccccccccccccccccccccccccccccaaaggcucuuuucagagccaccagaauu

SEQ ID NO: 20190 - RNA, 1157 nt, Artificial Sequence; identical to SEQ ID NO: 10030
  mRNA product Design i-2 comprising derived and/or modified sequence from HRSV(Memphis-37)__AIY60638.1__M (opt1)

SEQ ID NO: 20191 - RNA, 1157 nt, Artificial Sequence; identical to SEQ ID NO: 10031
  mRNA product Design i-2 comprising derived and/or modified sequence from HRSV(Memphis-37)__AIY60638.1__M (opt2)

SEQ ID NO: 20192 - RNA, 1157 nt, Artificial Sequence; identical to SEQ ID NO: 10032
  mRNA product Design i-2 comprising derived and/or modified sequence from HRSV(Memphis-37)__AIY60638.1__M (opt3)

SEQ ID NO: 20193 - RNA, 1157 nt, Artificial Sequence; identical to SEQ ID NO: 10033
  mRNA product Design i-2 comprising derived and/or modified sequence from HRSV(Memphis-37)__AIY60638.1__M (opt4)

SEQ ID NO: 20194 - RNA, 1157 nt, Artificial Sequence; identical to SEQ ID NO: 10034
  mRNA product Design i-2 comprising derived and/or modified sequence from HRSV(Memphis-37)__AIY60638.1__M (opt5)

SEQ ID NO: 20195 - RNA, 1157 nt, Artificial Sequence
  mRNA product Design i-2 comprising derived and/or modified sequence from HRSV(Memphis-37)__AIY60638.1__M (opt6)
gggagaggcgcugccuacggagguggcagccaucuccuucucggcaucaagcuuaccauggaaacauauguaaacaaauuacacgaaggauccacuuacacagccgcaguacaauacaauguacuagaaaaagacgacgacccagcaucacuaacaauauggguacccauguuccaauccucaaugccagcagaccuccuaauaaaagaacuagcuaauguaaacauacucguaaaacaaauauccacaccaaaaggaccaucacuacgaguaaugauaaacuccagauccgcaguacuagcacaaaugccaucaaaauucacaauaugcgccaacguaucacuagacgaaagaucaaaauuagcauacgacguaacaacaccaugcgaaauaaaagcaugcucacucacaugcuuaaaaucaaaaaacaugcuaacaacaguaaaagaccuaacaaugaaaacacucaaccccacccacgacauaauugccuuaugcgaauuugaaaacauaguaacauccaaaaaaguaauaauaccaacauaccuaagauccauuucaguaagaaacaaagaccuaaacacacuagaaaacauaacaacaacagaauuuaaaaacgcaauaacaaacgcaaaaauaauaccauacucaggauuacuacuuguaauaacaguaacagacaacaaaggagcauucaaauacauaaaaccucaaucacaauuuauaguagaccuaggagcauacuuagaaaaagaaucaaucuauuacgucacuacaaacuggaaacacacagcaaccagauucgcaauaaaacccauggaagacuaaggacuagugcaucacauuuaaaagcaucucagccuaccaugagaauaagagaaagaaaaugaagaucaauagcuuauucaucucuuuuucuuuuucguugguguaaagccaacacccugucuaaaaaacauaaauuucuuuaaucauuuugccucuuuucucugugcuucaauuaauaaaaaauggaaagaaccuagaucuaaaaaaaaaaaaaaaaaaaaaaaaaaaaaaaaaaaaaaaaaaaaaaaaaaaaaaaaaaaaaaaaugcaucccccccccccccccccccccccccccccccaaaggcucuuuucagagccaccagaauu

SEQ ID NO: 20196 - RNA, 1157 nt, Artificial Sequence
  mRNA product Design i-2 comprising derived and/or modified sequence from HRSV(Memphis-37)__AIY60638.1__M (opt11)
gggagaggcgcugccuacggagguggcagccaucuccuucucggcaucaagcuuaccauggaaaccuacgucaacaaacuccacgaaggauccaccuacaccgccgccguccaauacaacguccuugaaaaagacgacgaccccgccucccucaccaucuggguccccauguuccaauccucaaugcccgccgaccuccuaaucaaagaacucgccaacgucaacauccucgucaaacaaaucuccacccccaaaggccccucccuccgagucaugaucaacucccgcuccgccguccucgcacaaaugcccuccaaauucaccaucugcgccaacguaucccucgacgaacgcuccaaacucgcauacgacguuaccacucccugcgaaaucaaagccugcucacucaccugccucaaauccaaaaacaugcucaccaccgucaaagaccucaccaugaaaacccuaaaccccacccacgacaucaucgcccucugcgaauuugaaaacauagucaccuccaaaaaaguaaucauccccaccuaccuccgcuccaucuccguccgcaacaaagaccucaacacacucgaaaacaucacaaccaccgaauuuaaaaacgccaucaccaacgccaaaaucaucccauacuccggccuccuccuagucaucaccgucaccgacaacaaaggcgccuucaaguacaucaaaccacaaucccaauucaucgucgaccucggcgccuaccucgaaaaagaauccaucuacuacguaaccaccaacuggaaacacaccgccacccgcuucgccaucaaacccauggaagacuaaggacuagugcaucacauuuaaaagcaucucagccuaccaugagaauaagagaaagaaaaugaagaucaauagcuuauucaucucuuuuucuuuuucguugguguaaagccaacacccugucuaaaaaacauaaauuucuuuaaucauuuugccucuuuucucugugcuucaauuaauaaaaaauggaaagaaccuagaucuaaaaaaaaaaaaaaaaaaaaaaaaaaaaaaaaaaaaaaaaaaaaaaaaaaaaaaaaaaaaaaaaugcaucccccccccccccccccccccccccccccccaaaggcucuuuucagagccaccagaauu

SEQ ID NO: 20197 - RNA, 1153 nt, Artificial Sequence
  mRNA product Design i-2 comprising derived and/or modified sequence from HRSV(Memphis-37)__AIY60638.1__M (wt)
ggggcgcugccuacggagguggcagccaucuccuucucggcaucaagcuuaccauggaaacauacgugaacaaacuucacgaaggcuccacauacacagcugcuguucaauacaauguccuagaaaaagacgaugacccugcaucacuuacaauaugggugcccauguuccaaucauccaugccagcagauuuacuuauaaaagaacuagcuaaugucaacauacuagugaaacaaauauccacacccaaaggaccuucauuaagagucaugauaaacucaagaagugcagugcuagcacaaaugcccagcaaauucacuauaugugccaauguguccuuggaugaaagaagcaagcuggcauaugauguaaccacacccugcgaaaucaaggcauguagucuaacaugccuaaaaucaaaaaauauguuaacuacaguuaaagaucucacuaugaaaacacucaacccaacacaugacaucauugcuuuaugugaauuugaaaauauaguaacaucaaaaaaagucauaauaccaacauacuuaagauccaucagugucagaaauaaagaucugaacacacuugaaaauauaacaaccaccgaauucaaaaaugccaucacaaaugcaaaaaucaucccuuacucaggauuacuguuagucaucacagugacugacaacaaaggagcauuuaaauacauaaagccacaaagucaauucauaguagaucuuggagcuuaccuagaaaaagaaaguauauauuauguuacaacaaauuggaagcacacagcuacacgauuugcaaucaaacccauggaagauuaaggacuagugcaucacauuuaaaagcaucucagccuaccaugagaauaagagaaagaaaaugaagaucaauagcuuauucaucucuuuuucuuuuucguugguguaaagccaacacccugucuaaaaaacauaaauuucuuuaaucauuuugccucuuuucucugugcuucaauuaauaaaaaauggaaagaaccuagaucuaaaaaaaaaaaaaaaaaaaaaaaaaaaaaaaaaaaaaaaaaaaaaaaaaaaaaaaaaaaaaaaaugcaucccccccccccccccccccccccccccccccaaaggcucuuuucagagccaccagaauu

SEQ ID NO: 20198 - RNA, 1153 nt, Artificial Sequence; identical to SEQ ID NO: 10038
  mRNA product Design i-2 comprising derived and/or modified sequence from HRSV(Memphis-37)__AIY60638.1__M (opt1)

SEQ ID NO: 20199 - RNA, 1153 nt, Artificial Sequence; identical to SEQ ID NO: 10039
  mRNA product Design i-2 comprising derived and/or modified sequence from HRSV(Memphis-37)__AIY60638.1__M (opt2)

SEQ ID NO: 20200 - RNA, 1153 nt, Artificial Sequence; identical to SEQ ID NO: 10040
  mRNA product Design i-2 comprising derived and/or modified sequence from HRSV(Memphis-37)__AIY60638.1__M (opt3)

SEQ ID NO: 20201 - RNA, 1153 nt, Artificial Sequence; identical to SEQ ID NO: 10041
  mRNA product Design i-2 comprising derived and/or modified sequence from HRSV(Memphis-37)__AIY60638.1__M (opt4)

SEQ ID NO: 20202 - RNA, 1153 nt, Artificial Sequence; identical to SEQ ID NO: 10042
  mRNA product Design i-2 comprising derived and/or modified sequence from HRSV(Memphis-37)__AIY60638.1__M (opt5)

SEQ ID NO: 20203 - RNA, 1153 nt, Artificial Sequence
  mRNA product Design i-2 comprising derived and/or modified sequence from HRSV(Memphis-37)__AIY60638.1__M (opt6)
ggggcgcugccuacggagguggcagccaucuccuucucggcaucaagcuuaccauggaaacauauguaaacaaauuacacgaaggauccacuuacacagccgcaguacaauacaauguacuagaaaaagacgacgacccagcaucacuaacaauauggguacccauguuccaauccucaaugccagcagaccuccuaauaaaagaacuagcuaauguaaacauacucguaaaacaaauauccacaccaaaaggaccaucacuacgaguaaugauaaacuccagauccgcaguacuagcacaaaugccaucaaaauucacaauaugcgccaacguaucacuagacgaaagaucaaaauuagcauacgacguaacaacaccaugcgaaauaaaagcaugcucacucacaugcuuaaaaucaaaaaacaugcuaacaacaguaaaagaccuaacaaugaaaacacucaaccccacccacgacauaauugccuuaugcgaauuugaaaacauaguaacauccaaaaaaguaauaauaccaacauaccuaagauccauuucaguaagaaacaaagaccuaaacacacuagaaaacauaacaacaacagaauuuaaaaacgcaauaacaaacgcaaaaauaauaccauacucaggauuacuacuuguaauaacaguaacagacaacaaaggagcauucaaauacauaaaaccucaaucacaauuuauaguagaccuaggagcauacuuagaaaaagaaucaaucuauuacgucacuacaaacuggaaacacacagcaaccagauucgcaauaaaacccauggaagacuaaggacuagugcaucacauuuaaaagcaucucagccuaccaugagaauaagagaaagaaaaugaagaucaauagcuuauucaucucuuuuucuuuuucguugguguaaagccaacacccugucuaaaaaacauaaauuucuuuaaucauuuugccucuuuucucugugcuucaauuaauaaaaaauggaaagaaccuagaucuaaaaaaaaaaaaaaaaaaaaaaaaaaaaaaaaaaaaaaaaaaaaaaaaaaaaaaaaaaaaaaaaugcaucccccccccccccccccccccccccccccccaaaggcucuuuucagagccaccagaauu

SEQ ID NO: 20204 - RNA, 1153 nt, Artificial Sequence
  mRNA product Design i-2 comprising derived and/or modified sequence from HRSV(Memphis-37)__AIY60638.1__M (opt11)
ggggcgcugccuacggagguggcagccaucuccuucucggcaucaagcuuaccauggaaaccuacgucaacaaacuccacgaaggauccaccuacaccgccgccguccaauacaacguccuugaaaaagacgacgaccccgccucccucaccaucuggguccccauguuccaauccucaaugcccgccgaccuccuaaucaaagaacucgccaacgucaacauccucgucaaacaaaucuccacccccaaaggccccucccuccgagucaugaucaacucccgcuccgccguccucgcacaaaugcccuccaaauucaccaucugcgccaacguaucccucgacgaacgcuccaaacucgcauacgacguuaccacucccugcgaaaucaaagccugcucacucaccugccucaaauccaaaaacaugcucaccaccgucaaagaccucaccaugaaaacccuaaaccccacccacgacaucaucgcccucugcgaauuugaaaacauagucaccuccaaaaaaguaaucauccccaccuaccuccgcuccaucuccguccgcaacaaagaccucaacacacucgaaaacaucacaaccaccgaauuuaaaaacgccaucaccaacgccaaaaucaucccauacuccggccuccuccuagucaucaccgucaccgacaacaaaggcgccuucaaguacaucaaaccacaaucccaauucaucgucgaccucggcgccuaccucgaaaaagaauccaucuacuacguaaccaccaacuggaaacacaccgccacccgcuucgccaucaaacccauggaagacuaaggacuagugcaucacauuuaaaagcaucucagccuaccaugagaauaagagaaagaaaaugaagaucaauagcuuauucaucucuuuuucuuuuucguugguguaaagccaacacccugucuaaaaaacauaaauuucuuuaaucauuuugccucuuuucucugugcuucaauuaauaaaaaauggaaagaaccuagaucuaaaaaaaaaaaaaaaaaaaaaaaaaaaaaaaaaaaaaaaaaaaaaaaaaaaaaaaaaaaaaaaaugcaucccccccccccccccccccccccccccccccaaaggcucuuuucagagccaccagaauu

SEQ ID NO: 20205 - RNA, 988 nt, Artificial Sequence
  mRNA product Design i-3 comprising derived and/or modified sequence from HRSV(Memphis-37)__AIY60638.1__M (wt)
gggagaaagcuuaccauggaaacauacgugaacaaacuucacgaaggcuccacauacacagcugcuguucaauacaauguccuagaaaaagacgaugacccugcaucacuuacaauaugggugcccauguuccaaucauccaugccagcagauuuacuuauaaaagaacuagcuaaugucaacauacuagugaaacaaauauccacacccaaaggaccuucauuaagagucaugauaaacucaagaagugcagugcuagcacaaaugcccagcaaauucacuauaugugccaauguguccuuggaugaaagaagcaagcuggcauaugauguaaccacacccugcgaaaucaaggcauguagucuaacaugccuaaaaucaaaaaauauguuaacuacaguuaaagaucucacuaugaaaacacucaacccaacacaugacaucauugcuuuaugugaauuugaaaauauaguaacaucaaaaaaagucauaauaccaacauacuuaagauccaucagugucagaaauaaagaucugaacacacuugaaaauauaacaaccaccgaauucaaaaaugccaucacaaaugcaaaaaucaucccuuacucaggauuacuguuagucaucacagugacugacaacaaaggagcauuuaaauacauaaagccacaaagucaauucauaguagaucuuggagcuuaccuagaaaaagaaaguauauauuauguuacaacaaauuggaagcacacagcuacacgauuugcaaucaaacccauggaagauuaaggacuaguuauaagacugacuagcccgaugggccucccaacgggcccuccuccccuccuugcaccgagauuaauaaaaaaaaaaaaaaaaaaaaaaaaaaaaaaaaaaaaaaaaaaaaaaaaaaaaaaaaaaaaaaaaugcaucccccccccccccccccccccccccccccccaaaggcucuuuucagagccaccagaauu

SEQ ID NO: 20206 - RNA, 988 nt, Artificial Sequence; identical to SEQ ID NO: 10046
  mRNA product Design i-3 comprising derived and/or modified sequence from HRSV(Memphis-37)__AIY60638.1__M (opt1)

SEQ ID NO: 20207 - RNA, 988 nt, Artificial Sequence; identical to SEQ ID NO: 10047
  mRNA product Design i-3 comprising derived and/or modified sequence from HRSV(Memphis-37)__AIY60638.1__M (opt2)

SEQ ID NO: 20208 - RNA, 988 nt, Artificial Sequence; identical to SEQ ID NO: 10048
  mRNA product Design i-3 comprising derived and/or modified sequence from HRSV(Memphis-37)__AIY60638.1__M (opt3)

SEQ ID NO: 20209 - RNA, 988 nt, Artificial Sequence; identical to SEQ ID NO: 10049
  mRNA product Design i-3 comprising derived and/or modified sequence from HRSV(Memphis-37)__AIY60638.1__M (opt4)

SEQ ID NO: 20210 - RNA, 988 nt, Artificial Sequence; identical to SEQ ID NO: 10050
  mRNA product Design i-3 comprising derived and/or modified sequence from HRSV(Memphis-37)__AIY60638.1__M (opt5)

SEQ ID NO: 20211 - RNA, 988 nt, Artificial Sequence
  mRNA product Design i-3 comprising derived and/or modified sequence from HRSV(Memphis-37)__AIY60638.1__M (opt6)
gggagaaagcuuaccauggaaacauauguaaacaaauuacacgaaggauccacuuacacagccgcaguacaauacaauguacuagaaaaagacgacgacccagcaucacuaacaauauggguacccauguuccaauccucaaugccagcagaccuccuaauaaaagaacuagcuaauguaaacauacucguaaaacaaauauccacaccaaaaggaccaucacuacgaguaaugauaaacuccagauccgcaguacuagcacaaaugccaucaaaauucacaauaugcgccaacguaucacuagacgaaagaucaaaauuagcauacgacguaacaacaccaugcgaaauaaaagcaugcucacucacaugcuuaaaaucaaaaaacaugcuaacaacaguaaaagaccuaacaaugaaaacacucaaccccacccacgacauaauugccuuaugcgaauuugaaaacauaguaacauccaaaaaaguaauaauaccaacauaccuaagauccauuucaguaagaaacaaagaccuaaacacacuagaaaacauaacaacaacagaauuuaaaaacgcaauaacaaacgcaaaaauaauaccauacucaggauuacuacuuguaauaacaguaacagacaacaaaggagcauucaaauacauaaaaccucaaucacaauuuauaguagaccuaggagcauacuuagaaaaagaaucaaucuauuacgucacuacaaacuggaaacacacagcaaccagauucgcaauaaaacccauggaagacuaaggacuaguuauaagacugacuagcccgaugggccucccaacgggcccuccuccccuccuugcaccgagauuaauaaaaaaaaaaaaaaaaaaaaaaaaaaaaaaaaaaaaaaaaaaaaaaaaaaaaaaaaaaaaaaaaugcaucccccccccccccccccccccccccccccccaaaggcucuuuucagagccaccagaauu

SEQ ID NO: 20212 - RNA, 988 nt, Artificial Sequence
  mRNA product Design i-3 comprising derived and/or modified sequence from HRSV(Memphis-37)__AIY60638.1__M (opt11)
gggagaaagcuuaccauggaaaccuacgucaacaaacuccacgaaggauccaccuacaccgccgccguccaauacaacguccuugaaaaagacgacgaccccgccucccucaccaucuggguccccauguuccaauccucaaugcccgccgaccuccuaaucaaagaacucgccaacgucaacauccucgucaaacaaaucuccacccccaaaggccccucccuccgagucaugaucaacucccgcuccgccguccucgcacaaaugcccuccaaauucaccaucugcgccaacguaucccucgacgaacgcuccaaacucgcauacgacguuaccacucccugcgaaaucaaagccugcucacucaccugccucaaauccaaaaacaugcucaccaccgucaaagaccucaccaugaaaacccuaaaccccacccacgacaucaucgcccucugcgaauuugaaaacauagucaccuccaaaaaaguaaucauccccaccuaccuccgcuccaucuccguccgcaacaaagaccucaacacacucgaaaacaucacaaccaccgaauuuaaaaacgccaucaccaacgccaaaaucaucccauacuccggccuccuccuagucaucaccgucaccgacaacaaaggcgccuucaaguacaucaaaccacaaucccaauucaucgucgaccucggcgccuaccucgaaaaagaauccaucuacuacguaaccaccaacuggaaacacaccgccacccgcuucgccaucaaacccauggaagacuaaggacuaguuauaagacugacuagcccgaugggccucccaacgggcccuccuccccuccuugcaccgagauuaauaaaaaaaaaaaaaaaaaaaaaaaaaaaaaaaaaaaaaaaaaaaaaaaaaaaaaaaaaaaaaaaaugcaucccccccccccccccccccccccccccccccaaaggcucuuuucagagccaccagaauu

SEQ ID NO: 20213 - protein, 391 aa, Artificial Sequence; identical to SEQ ID NO: 10503
  derived and/or modified protein sequence (wt) from HRSV(Memphis-37)__AIY60635.1__N

SEQ ID NO: 20214 - RNA, 1176 nt, Artificial Sequence
  derived and/or modified CDS sequence (wt) from HRSV(Memphis-37)__AIY60635.1__N
auggcucuuagcaaagucaaguugaacgauacacucaacaaagaucaacuucugucauccagcaaauacaccauccaacggagcacaggagauaguauugauacuccuaauuaugaugugcagaaacacaucaacaaguuauguggcauguuauuaaucacagaagaugcuaaucauaaauucacugggguaauagguauguuauaugcuaugucuagauuaggaagagaagacaccauaaaaauacucagagaugcgggauaucauguaaaagcaaauggaguggauguaacaacacaucgucaagacauuaauggaaaagaaaugaaauuugaaguguuaacauuggcaagcuuaacaacugaaauucaaaucaacauugagauagaaucuaggaaauccuacaaaaaaaugcuaaaagaaaugggagagguggcuccagaauacaggcaugacucuccugauuguggaaugauaauauuauguauagcagcauuaguaauaaccaaauuagcagcaggggauagaucuggucuuacugcugugauuaggagagcuaauaauguucuaaaaaaugaaaugaaacguuauaaaggcuuacuaccaaaggauauagccaacagcuucuaugaaguguuugaaaaauauccucacuuuauagauguuuuuguucauuuugguauagcacaaucuucuaccagagguggcaguagaguugaagggauuuuugcaggauuguuuaugaaugccuauggugcagggcaagugauguuacgguggggagucuuagcaaaaucaguuaaaaauauuaugcuaggacaugcuagugugcaagcagaaauggaacaaguuguggaaguuuaugaauaugcccaaaaauuggguggagaagcaggauucuaccauauauugaacaauccaaaagcaucauuauuaucuuugacucaauuuccccacuucuccaguguaguauugggcaaugcugcuggccuaggcauaaugggagaauacagagguacaccaaggaaucaagaucuauaugaugcugcaaaggcauaugcugaacaacucaaagaaaauggugugauuaacuacaguguauuagacuugacagcagaagaacuagaggcuaucaaacaucagcuuaauccaaaagauaaugauguagagcuuuga

SEQ ID NO: 20215 - RNA, 1176 nt, Artificial Sequence
  derived and/or modified CDS sequence (opt1) from HRSV(Memphis-37)__AIY60635.1__N
auggcccugagcaaggugaagcucaacgacacccugaacaaggaccagcugcucuccagcuccaaguacaccauccagcgcagcaccggcgacuccaucgacacccccaacuacgacguccagaagcacaucaacaagcugugcgggaugcugcucaucaccgaggacgccaaccacaaguucaccggcgugaucgggaugcuguacgcgaugagccggcugggccgcgaggacacgaucaagauccuccgggacgccggguaccacgugaaggccaacggcgucgacgugaccacccaccgccaggacaucaacggcaaggagaugaaguucgaggugcugacccuggccucccucacgaccgagauccagaucaacaucgagaucgagagccggaaguccuacaagaagaugcugaaggagaugggggaggucgccccggaguaccgccacgacagccccgacugcggcaugaucauccugugcaucgcggcccucgugaucaccaagcuggccgccggggaccgguccggccugaccgcggugauccgccgggccaacaacguccucaagaacgagaugaagcgcuacaaggggcugcugcccaaggacaucgccaacagcuucuacgagguguucgagaaguacccccacuucaucgacguguucguccacuucggcaucgcccaguccagcacgcggggcgggucccgcguggagggcaucuucgccgggcuguucaugaacgcguacggcgccggccaggugaugcugcgguggggcguccuggccaagagcgugaagaacaucaugcucgggcacgccuccgugcaggccgagauggagcaggucguggagguguacgaguacgcgcagaagcucgggggcgaggccggguucuaccacauccugaacaacccgaaggccagccuccugucccugacccaguucccccacuucagcagcgucgugcucggcaacgccgccggccuggggaucaugggcgaguaccgcgggacgccccggaaccaggaccuguacgacgcggccaaggccuacgccgagcagcucaaggagaacggcgugaucaacuacuccguccuggaccugaccgccgaggagcucgaggcgaucaagcaccagcugaaccccaaggacaacgacguggagcuguga

SEQ ID NO: 20216 - RNA, 1176 nt, Artificial Sequence
  derived and/or modified CDS sequence (opt2) from HRSV(Memphis-37)__AIY60635.1__N
auggcccucuccaaggucaagcucaacgacacccucaacaaggaccagcuccucuccuccuccaaguacaccauccagcgcuccaccggcgacuccaucgacacccccaacuacgacguccagaagcacaucaacaagcucugcggcaugcuccucaucaccgaggacgccaaccacaaguucaccggcgucaucggcaugcucuacgccaugucccgccucggccgcgaggacaccaucaagauccuccgcgacgccggcuaccacgucaaggccaacggcgucgacgucaccacccaccgccaggacaucaacggcaaggagaugaaguucgagguccucacccucgccucccucaccaccgagauccagaucaacaucgagaucgagucccgcaaguccuacaagaagaugcucaaggagaugggcgaggucgcccccgaguaccgccacgacucccccgacugcggcaugaucauccucugcaucgccgcccucgucaucaccaagcucgccgccggcgaccgcuccggccucaccgccgucauccgccgcgccaacaacguccucaagaacgagaugaagcgcuacaagggccuccuccccaaggacaucgccaacuccuucuacgaggucuucgagaaguacccccacuucaucgacgucuucguccacuucggcaucgcccaguccuccacccgcggcggcucccgcgucgagggcaucuucgccggccucuucaugaacgccuacggcgccggccaggucaugcuccgcuggggcguccucgccaaguccgucaagaacaucaugcucggccacgccuccguccaggccgagauggagcaggucgucgaggucuacgaguacgcccagaagcucggcggcgaggccggcuucuaccacauccucaacaaccccaaggccucccuccucucccucacccaguucccccacuucuccuccgucguccucggcaacgccgccggccucggcaucaugggcgaguaccgcggcaccccccgcaaccaggaccucuacgacgccgccaaggccuacgccgagcagcucaaggagaacggcgucaucaacuacuccguccucgaccucaccgccgaggagcucgaggccaucaagcaccagcucaaccccaaggacaacgacgucgagcucuga

SEQ ID NO: 20217 - RNA, 1176 nt, Artificial Sequence
  derived and/or modified CDS sequence (opt3) from HRSV(Memphis-37)__AIY60635.1__N
auggcccugagcaaggugaaacucaacgacacccuuaauaaggaucagcuguuguccucuucaaaauacacaauccaaagaaguacuggcgacagcauugauacgcccaacuaugacguccagaagcacauaaauaaauuaugcgggaugcugcuaaucaccgaggaugcuaaccauaaguucacaggaguuauugguaugcucuacgcaauguccaggcugggccgggaagacacuaucaagauucuucgcgaugccggguaucacgugaaagcgaauggaguagacgugaccacacaucgacaggauaucaacggcaaggagaugaaauuugaaguccugaccuuggcuucucucacuacagagauacagaucaauauugaaaucgagucgcguaagucauacaaaaagaugcugaaggagaugggugaaguggccccugaguauagacacgacagcccagauugugggaugauuauccugugcauagcagcccucguuauuaccaaauuagcugcaggagacaggaguggccugacggccgugauccggcgcgcuaacaauguccuuaagaacgaaaugaaaagauacaagggcuugcugccgaaagauauugccaauuccuucuaugagguguuugagaaguacccccauuucaucgacguauuuguucacuucgggaucgcgcaaucuagcacuaggggagguucccggguggaaggcauuuuugcagggcuauucaugaacgccuacggagcuggccaggucaugcuccgcuggggugugcuggccaaaucagugaagaauauaaugcuugggcacgcaaguguccaggcugagauggaacagguuguggagguauaugaauacgcccaaaagcugggaggcgaggcgggcuuuuaucauaucuugaacaauccuaaagccagccuccugucuuuaacccaguucccacacuuuuccucagugguccuggggaacgcagcuggacucgguauuaugggcgaguaccgagggacacccagaaaccaggaccuuuaugaugccgcuaaggccuacgcagaacagcugaaagagaauggagugaucaacuauagcguuuuggaccuaacugccgaggaacuggaagcuauaaagcaucaacucaauccuaaagauaacgacguggagcuguga

SEQ ID NO: 20218 - RNA, 1176 nt, Artificial Sequence
  derived and/or modified CDS sequence (opt4) from HRSV(Memphis-37)__AIY60635.1__N
auggcccugagcaaggugaagcugaacgacacccugaacaaggaccagcugcugagcagcagcaaguacaccauccagagaagcaccggcgacagcaucgacacccccaacuacgacgugcagaagcacaucaacaagcugugcggcaugcugcugaucaccgaggacgccaaccacaaguucaccggcgugaucggcaugcuguacgccaugagcagacugggcagagaggacaccaucaagauccugagagacgccggcuaccacgugaaggccaacggcguggacgugaccacccacagacaggacaucaacggcaaggagaugaaguucgaggugcugacccuggccagccugaccaccgagauccagaucaacaucgagaucgagagcagaaagagcuacaagaagaugcugaaggagaugggcgagguggcccccgaguacagacacgacagccccgacugcggcaugaucauccugugcaucgccgcccuggugaucaccaagcuggccgccggcgacagaagcggccugaccgccgugaucagaagagccaacaacgugcugaagaacgagaugaagagauacaagggccugcugcccaaggacaucgccaacagcuucuacgagguguucgagaaguacccccacuucaucgacguguucgugcacuucggcaucgcccagagcagcaccagaggcggcagcagaguggagggcaucuucgccggccuguucaugaacgccuacggcgccggccaggugaugcugagauggggcgugcuggccaagagcgugaagaacaucaugcugggccacgccagcgugcaggccgagauggagcaggugguggagguguacgaguacgcccagaagcugggcggcgaggccggcuucuaccacauccugaacaaccccaaggccagccugcugagccugacccaguucccccacuucagcagcguggugcugggcaacgccgccggccugggcaucaugggcgaguacagaggcacccccagaaaccaggaccuguacgacgccgccaaggccuacgccgagcagcugaaggagaacggcgugaucaacuacagcgugcuggaccugaccgccgaggagcuggaggccaucaagcaccagcugaaccccaaggacaacgacguggagcuguga

SEQ ID NO: 20219 - RNA, 1176 nt, Artificial Sequence
  derived and/or modified CDS sequence (opt5) from HRSV(Memphis-37)__AIY60635.1__N
auggcccugagcaaggugaaacucaacgacacccugaauaaggaucagcuucuguccucuagcaaauacacaauccaaagauccacgggcgacucuauugauacccccaacuaugacguccagaagcacaucaauaaacucugcgggaugcugcuuauuacagaggaugcuaaccauaaguucaccggaguuaucggcaugcuguacgccaugagccggcucgggcgcgaagacacaauuaagauccugagagaugcgggauaucacgugaaagcuaauggcguggacgucaccacacaucggcaggauaucaacgggaaggagaugaaauuugaagugcugacccucgccucccugacgaccgagauucagaucaauauugaaaucgagucucgcaagagcuacaaaaagaugcuuaaggagaugggagaaguugccccugaguauagacacgacuccccggauuguggcaugauuauccugugcauugcugcccucgugaucacaaaacuggcugccggcgaccggagcgggcuuaccgcggucauccgcagagccaacaaugugcugaagaacgaaaugaaacgguacaagggacuccugcccaaagauauugcuaauucuuucuaugagguuuuugagaaguacccucauuucaucgacguguuuguccacuucggcauugcccaauccagcacacgcgggggaucuagaguggaaggcaucuuugcugggcuguucaugaacgccuacggagcgggccaggugaugcuccgguggggcguccuggccaaauccguuaagaauauuaugcuugggcacgcuagcgugcaggccgagauggaacagguggucgagguguaugaauacgcucaaaagcugggaggcgaggccggguuuuaucauauccucaacaaucccaaagccucucugcuuucccugacccaguucccucacuuuagcuccguugugcucggaaacgcugcgggccuggggaucaugggagaguaccgcggcacgcccagaaaccaggaccuguaugaugccgcuaaggccuacgccgaacagcucaaagagaauggcgucauuaacuauucugugcuggaccuuacagcugaggaacuggaagccaucaagcaucaacucaauccuaaagauaacgacguugagcuguga

SEQ ID NO: 20220 - RNA, 1176 nt, Artificial Sequence
  derived and/or modified CDS sequence (opt6) from HRSV(Memphis-37)__AIY60635.1__N
auggccuuaaguaaaguaaaauuaaacgacacacuaaacaaagaccaauuacucucaucaucgaaauauacaauacaaagauccacaggagacuccauagauacaccaaauuacgacguacaaaaacauauaaacaaacucugcggaauguuauuaauaacagaagacgcaaaccacaaauucacaggagucauagguaugcuauacgcaaugucaagauuaggaagagaagauacaauaaaaauacuaagagacgcaggauaccacguaaaagcaaacggaguagacguaacaacacauagacaagauauaaacgguaaagaaaugaaauucgaaguacuaacacuagccagucuaacaacagaaauacaaauaaacauagaaauagaaagccgaaaaucauacaaaaaaauguuaaaagaaaugggggaaguagcacccgaauacagacaugauucaccugacugcggaaugauaauacucugcauagcggcauuagucauaacaaaacuagccgcaggagacagaagcggauuaacagcaguaauaagaagagcaaauaauguauuaaaaaaugaaaugaaaagguauaaaggauuacuaccaaaagauauagcaaacucauucuaugaaguuuucgaaaaauacccacacuucauagacgucuucguacacuuuggaauagcacaaagcagcacaagaggaggaagcagaguagaaggaauauucgcaggacuauucaugaaugcauacggagccggacaaguaaugcuaagauggggaguuuuagcaaaaagcguaaaaaacauaauguuaggacacgccuccguccaagccgaaauggaacaaguaguagaaguauacgaauaugcacaaaaacuaggaggagaagcaggauucuaucacauacucaauaacccaaaagcaucacuauugagcuuaacacaauucccacauuuuucauccguaguccuaggaaaugcagcaggcuuaggaauaaugggagaauacagaggcacaccaagaaaucaagacuuauacgaugcagcaaaagcauacgcagaacaacuaaaagaaaacggaguaauaaacuacucaguauuagauuuaacagcagaagaauuagaagcaauaaaacaucaacuaaauccuaaggauaaugauguagaacucuaa

SEQ ID NO: 20221 - RNA, 1176 nt, Artificial Sequence
  derived and/or modified CDS sequence (opt11) from HRSV(Memphis-37)__AIY60635.1__N
auggcccuaagcaaagucaaacucaacgacacacuaaacaaagaccaacuccucagcuccagcaaauacaccauccaacgauccaccggcgacuccauagacacccccaacuacgacguccaaaaacacaucaacaaacuaugcggcaugcuccuaaucacagaagacgccaaccacaaauucaccggagucaucggcaugcucuacgccaugagccgccucggccgagaagacacaaucaaaauacuaagagacgccggcuaccacguaaaagccaacggcguagacguaaccacccaccgccaagacaucaacggcaaagaaaugaaauucgaaguucucacccucgccucacuaaccacggaaauccaaauaaacauugaaaucgaaagcagaaaauccuacaaaaagaugcuaaaagaaaugggcgagguagccccagaauaccgccacgacagccccgacugcggaaugaucauccucugcauugcagcccucgucaucaccaaacuagccgccggcgacagaagcggccuaaccgcaguaauccgccgagccaacaacguacucaaaaacgaaaugaaacgcuacaaaggccuccuccccaaagacaucgccaacagcuucuacgaaguauucgaaaaauacccgcacuucaucgacgucuucguacacuucggcauagcccaaagcagcacacgaggcggcucccgcgucgaaggaauauucgccggccuguucaugaacgcauacggagcgggccaagucaugcuccgcugggguguacuagccaaguccgucaaaaacaucaugcuagggcacgcaagcguacaagccgaaauggaacaaguagucgaagucuacgaauacgcacaaaaacuaggcggcgaagccggcuucuaccacauccuaaacaaccccaaagccucauuacucucccucacccaauuuccucacuucuccagcgucguccucggaaacgccgccggccuaggcauaaugggggaauaccgcggcaccccgcgcaaccaagaccucuacgacgcagcaaaagccuacgcagaacaacuaaaagaaaacggagucaucaacuacagcguacuggaccuaaccgccgaagaacucgaagccauaaaacaccaacucaaccccaaagacaacgacgucgagcucuaa

SEQ ID NO: 20222 - RNA, 1452 nt, Artificial Sequence
  mRNA product Design a-1 comprising derived and/or modified sequence from HRSV(Memphis-37)__AIY60635.1__N (wt)
gggagagucccgcagucggcguccagcggcucugcuuguucgugugugugucguugcaggccuuauucaagcuuaccauggcucuuagcaaagucaaguugaacgauacacucaacaaagaucaacuucugucauccagcaaauacaccauccaacggagcacaggagauaguauugauacuccuaauuaugaugugcagaaacacaucaacaaguuauguggcauguuauuaaucacagaagaugcuaaucauaaauucacugggguaauagguauguuauaugcuaugucuagauuaggaagagaagacaccauaaaaauacucagagaugcgggauaucauguaaaagcaaauggaguggauguaacaacacaucgucaagacauuaauggaaaagaaaugaaauuugaaguguuaacauuggcaagcuuaacaacugaaauucaaaucaacauugagauagaaucuaggaaauccuacaaaaaaaugcuaaaagaaaugggagagguggcuccagaauacaggcaugacucuccugauuguggaaugauaauauuauguauagcagcauuaguaauaaccaaauuagcagcaggggauagaucuggucuuacugcugugauuaggagagcuaauaauguucuaaaaaaugaaaugaaacguuauaaaggcuuacuaccaaaggauauagccaacagcuucuaugaaguguuugaaaaauauccucacuuuauagauguuuuuguucauuuugguauagcacaaucuucuaccagagguggcaguagaguugaagggauuuuugcaggauuguuuaugaaugccuauggugcagggcaagugauguuacgguggggagucuuagcaaaaucaguuaaaaauauuaugcuaggacaugcuagugugcaagcagaaauggaacaaguuguggaaguuuaugaauaugcccaaaaauuggguggagaagcaggauucuaccauauauugaacaauccaaaagcaucauuauuaucuuugacucaauuuccccacuucuccaguguaguauugggcaaugcugcuggccuaggcauaaugggagaauacagagguacaccaaggaaucaagaucuauaugaugcugcaaaggcauaugcugaacaacucaaagaaaauggugugauuaacuacaguguauuagacuugacagcagaagaacuagaggcuaucaaacaucagcuuaauccaaaagauaaugauguagagcuuugaggacuagucccuguucccagagcccacuuuuuuuucuuuuuuugaaauaaaauagccugucuuucagaucuaaaaaaaaaaaaaaaaaaaaaaaaaaaaaaaaaaaaaaaaaaaaaaaaaaaaaaaaaaaaaaaaugcaucccccccccccccccccccccccccccccccaaaggcucuuuucagagccaccagaauu

SEQ ID NO: 20223 - RNA, 1452 nt, Artificial Sequence
  mRNA product Design a-1 comprising derived and/or modified sequence from HRSV(Memphis-37)__AIY60635.1__N (opt1)
gggagagucccgcagucggcguccagcggcucugcuuguucgugugugugucguugcaggccuuauucaagcuuaccauggcccugagcaaggugaagcucaacgacacccugaacaaggaccagcugcucuccagcuccaaguacaccauccagcgcagcaccggcgacuccaucgacacccccaacuacgacguccagaagcacaucaacaagcugugcgggaugcugcucaucaccgaggacgccaaccacaaguucaccggcgugaucgggaugcuguacgcgaugagccggcugggccgcgaggacacgaucaagauccuccgggacgccggguaccacgugaaggccaacggcgucgacgugaccacccaccgccaggacaucaacggcaaggagaugaaguucgaggugcugacccuggccucccucacgaccgagauccagaucaacaucgagaucgagagccggaaguccuacaagaagaugcugaaggagaugggggaggucgccccggaguaccgccacgacagccccgacugcggcaugaucauccugugcaucgcggcccucgugaucaccaagcuggccgccggggaccgguccggccugaccgcggugauccgccgggccaacaacguccucaagaacgagaugaagcgcuacaaggggcugcugcccaaggacaucgccaacagcuucuacgagguguucgagaaguacccccacuucaucgacguguucguccacuucggcaucgcccaguccagcacgcggggcgggucccgcguggagggcaucuucgccgggcuguucaugaacgcguacggcgccggccaggugaugcugcgguggggcguccuggccaagagcgugaagaacaucaugcucgggcacgccuccgugcaggccgagauggagcaggucguggagguguacgaguacgcgcagaagcucgggggcgaggccggguucuaccacauccugaacaacccgaaggccagccuccugucccugacccaguucccccacuucagcagcgucgugcucggcaacgccgccggccuggggaucaugggcgaguaccgcgggacgccccggaaccaggaccuguacgacgcggccaaggccuacgccgagcagcucaaggagaacggcgugaucaacuacuccguccuggaccugaccgccgaggagcucgaggcgaucaagcaccagcugaaccccaaggacaacgacguggagcugugaggacuagucccuguucccagagcccacuuuuuuuucuuuuuuugaaauaaaauagccugucuuucagaucuaaaaaaaaaaaaaaaaaaaaaaaaaaaaaaaaaaaaaaaaaaaaaaaaaaaaaaaaaaaaaaaaugcaucccccccccccccccccccccccccccccccaaaggcucuuuucagagccaccagaauu

SEQ ID NO: 20224 - RNA, 1452 nt, Artificial Sequence
  mRNA product Design a-1 comprising derived and/or modified sequence from HRSV(Memphis-37)__AIY60635.1__N (opt2)
gggagagucccgcagucggcguccagcggcucugcuuguucgugugugugucguugcaggccuuauucaagcuuaccauggcccucuccaaggucaagcucaacgacacccucaacaaggaccagcuccucuccuccuccaaguacaccauccagcgcuccaccggcgacuccaucgacacccccaacuacgacguccagaagcacaucaacaagcucugcggcaugcuccucaucaccgaggacgccaaccacaaguucaccggcgucaucggcaugcucuacgccaugucccgccucggccgcgaggacaccaucaagauccuccgcgacgccggcuaccacgucaaggccaacggcgucgacgucaccacccaccgccaggacaucaacggcaaggagaugaaguucgagguccucacccucgccucccucaccaccgagauccagaucaacaucgagaucgagucccgcaaguccuacaagaagaugcucaaggagaugggcgaggucgcccccgaguaccgccacgacucccccgacugcggcaugaucauccucugcaucgccgcccucgucaucaccaagcucgccgccggcgaccgcuccggccucaccgccgucauccgccgcgccaacaacguccucaagaacgagaugaagcgcuacaagggccuccuccccaaggacaucgccaacuccuucuacgaggucuucgagaaguacccccacuucaucgacgucuucguccacuucggcaucgcccaguccuccacccgcggcggcucccgcgucgagggcaucuucgccggccucuucaugaacgccuacggcgccggccaggucaugcuccgcuggggcguccucgccaaguccgucaagaacaucaugcucggccacgccuccguccaggccgagauggagcaggucgucgaggucuacgaguacgcccagaagcucggcggcgaggccggcuucuaccacauccucaacaaccccaaggccucccuccucucccucacccaguucccccacuucuccuccgucguccucggcaacgccgccggccucggcaucaugggcgaguaccgcggcaccccccgcaaccaggaccucuacgacgccgccaaggccuacgccgagcagcucaaggagaacggcgucaucaacuacuccguccucgaccucaccgccgaggagcucgaggccaucaagcaccagcucaaccccaaggacaacgacgucgagcucugaggacuagucccuguucccagagcccacuuuuuuuucuuuuuuugaaauaaaauagccugucuuucagaucuaaaaaaaaaaaaaaaaaaaaaaaaaaaaaaaaaaaaaaaaaaaaaaaaaaaaaaaaaaaaaaaaugcaucccccccccccccccccccccccccccccccaaaggcucuuuucagagccaccagaauu

SEQ ID NO: 20225 - RNA, 1452 nt, Artificial Sequence
  mRNA product Design a-1 comprising derived and/or modified sequence from HRSV(Memphis-37)__AIY60635.1__N (opt3)
gggagagucccgcagucggcguccagcggcucugcuuguucgugugugugucguugcaggccuuauucaagcuuaccauggcccugagcaaggugaaacucaacgacacccuuaauaaggaucagcuguuguccucuucaaaauacacaauccaaagaaguacuggcgacagcauugauacgcccaacuaugacguccagaagcacauaaauaaauuaugcgggaugcugcuaaucaccgaggaugcuaaccauaaguucacaggaguuauugguaugcucuacgcaauguccaggcugggccgggaagacacuaucaagauucuucgcgaugccggguaucacgugaaagcgaauggaguagacgugaccacacaucgacaggauaucaacggcaaggagaugaaauuugaaguccugaccuuggcuucucucacuacagagauacagaucaauauugaaaucgagucgcguaagucauacaaaaagaugcugaaggagaugggugaaguggccccugaguauagacacgacagcccagauugugggaugauuauccugugcauagcagcccucguuauuaccaaauuagcugcaggagacaggaguggccugacggccgugauccggcgcgcuaacaauguccuuaagaacgaaaugaaaagauacaagggcuugcugccgaaagauauugccaauuccuucuaugagguguuugagaaguacccccauuucaucgacguauuuguucacuucgggaucgcgcaaucuagcacuaggggagguucccggguggaaggcauuuuugcagggcuauucaugaacgccuacggagcuggccaggucaugcuccgcuggggugugcuggccaaaucagugaagaauauaaugcuugggcacgcaaguguccaggcugagauggaacagguuguggagguauaugaauacgcccaaaagcugggaggcgaggcgggcuuuuaucauaucuugaacaauccuaaagccagccuccugucuuuaacccaguucccacacuuuuccucagugguccuggggaacgcagcuggacucgguauuaugggcgaguaccgagggacacccagaaaccaggaccuuuaugaugccgcuaaggccuacgcagaacagcugaaagagaauggagugaucaacuauagcguuuuggaccuaacugccgaggaacuggaagcuauaaagcaucaacucaauccuaaagauaacgacguggagcugugaggacuagucccuguucccagagcccacuuuuuuuucuuuuuuugaaauaaaauagccugucuuucagaucuaaaaaaaaaaaaaaaaaaaaaaaaaaaaaaaaaaaaaaaaaaaaaaaaaaaaaaaaaaaaaaaaugcaucccccccccccccccccccccccccccccccaaaggcucuuuucagagccaccagaauu

SEQ ID NO: 20226 - RNA, 1452 nt, Artificial Sequence
  mRNA product Design a-1 comprising derived and/or modified sequence from HRSV(Memphis-37)__AIY60635.1__N (opt4)
gggagagucccgcagucggcguccagcggcucugcuuguucgugugugugucguugcaggccuuauucaagcuuaccauggcccugagcaaggugaagcugaacgacacccugaacaaggaccagcugcugagcagcagcaaguacaccauccagagaagcaccggcgacagcaucgacacccccaacuacgacgugcagaagcacaucaacaagcugugcggcaugcugcugaucaccgaggacgccaaccacaaguucaccggcgugaucggcaugcuguacgccaugagcagacugggcagagaggacaccaucaagauccugagagacgccggcuaccacgugaaggccaacggcguggacgugaccacccacagacaggacaucaacggcaaggagaugaaguucgaggugcugacccuggccagccugaccaccgagauccagaucaacaucgagaucgagagcagaaagagcuacaagaagaugcugaaggagaugggcgagguggcccccgaguacagacacgacagccccgacugcggcaugaucauccugugcaucgccgcccuggugaucaccaagcuggccgccggcgacagaagcggccugaccgccgugaucagaagagccaacaacgugcugaagaacgagaugaagagauacaagggccugcugcccaaggacaucgccaacagcuucuacgagguguucgagaaguacccccacuucaucgacguguucgugcacuucggcaucgcccagagcagcaccagaggcggcagcagaguggagggcaucuucgccggccuguucaugaacgccuacggcgccggccaggugaugcugagauggggcgugcuggccaagagcgugaagaacaucaugcugggccacgccagcgugcaggccgagauggagcaggugguggagguguacgaguacgcccagaagcugggcggcgaggccggcuucuaccacauccugaacaaccccaaggccagccugcugagccugacccaguucccccacuucagcagcguggugcugggcaacgccgccggccugggcaucaugggcgaguacagaggcacccccagaaaccaggaccuguacgacgccgccaaggccuacgccgagcagcugaaggagaacggcgugaucaacuacagcgugcuggaccugaccgccgaggagcuggaggccaucaagcaccagcugaaccccaaggacaacgacguggagcugugaggacuagucccuguucccagagcccacuuuuuuuucuuuuuuugaaauaaaauagccugucuuucagaucuaaaaaaaaaaaaaaaaaaaaaaaaaaaaaaaaaaaaaaaaaaaaaaaaaaaaaaaaaaaaaaaaugcaucccccccccccccccccccccccccccccccaaaggcucuuuucagagccaccagaauu

SEQ ID NO: 20227 - RNA, 1452 nt, Artificial Sequence
  mRNA product Design a-1 comprising derived and/or modified sequence from HRSV(Memphis-37)__AIY60635.1__N (opt5)
gggagagucccgcagucggcguccagcggcucugcuuguucgugugugugucguugcaggccuuauucaagcuuaccauggcccugagcaaggugaaacucaacgacacccugaauaaggaucagcuucuguccucuagcaaauacacaauccaaagauccacgggcgacucuauugauacccccaacuaugacguccagaagcacaucaauaaacucugcgggaugcugcuuauuacagaggaugcuaaccauaaguucaccggaguuaucggcaugcuguacgccaugagccggcucgggcgcgaagacacaauuaagauccugagagaugcgggauaucacgugaaagcuaauggcguggacgucaccacacaucggcaggauaucaacgggaaggagaugaaauuugaagugcugacccucgccucccugacgaccgagauucagaucaauauugaaaucgagucucgcaagagcuacaaaaagaugcuuaaggagaugggagaaguugccccugaguauagacacgacuccccggauuguggcaugauuauccugugcauugcugcccucgugaucacaaaacuggcugccggcgaccggagcgggcuuaccgcggucauccgcagagccaacaaugugcugaagaacgaaaugaaacgguacaagggacuccugcccaaagauauugcuaauucuuucuaugagguuuuugagaaguacccucauuucaucgacguguuuguccacuucggcauugcccaauccagcacacgcgggggaucuagaguggaaggcaucuuugcugggcuguucaugaacgccuacggagcgggccaggugaugcuccgguggggcguccuggccaaauccguuaagaauauuaugcuugggcacgcuagcgugcaggccgagauggaacagguggucgagguguaugaauacgcucaaaagcugggaggcgaggccggguuuuaucauauccucaacaaucccaaagccucucugcuuucccugacccaguucccucacuuuagcuccguugugcucggaaacgcugcgggccuggggaucaugggagaguaccgcggcacgcccagaaaccaggaccuguaugaugccgcuaaggccuacgccgaacagcucaaagagaauggcgucauuaacuauucugugcuggaccuuacagcugaggaacuggaagccaucaagcaucaacucaauccuaaagauaacgacguugagcugugaggacuagucccuguucccagagcccacuuuuuuuucuuuuuuugaaauaaaauagccugucuuucagaucuaaaaaaaaaaaaaaaaaaaaaaaaaaaaaaaaaaaaaaaaaaaaaaaaaaaaaaaaaaaaaaaaugcaucccccccccccccccccccccccccccccccaaaggcucuuuucagagccaccagaauu

SEQ ID NO: 20228 - RNA, 1452 nt, Artificial Sequence
  mRNA product Design a-1 comprising derived and/or modified sequence from HRSV(Memphis-37)__AIY60635.1__N (opt6)
gggagagucccgcagucggcguccagcggcucugcuuguucgugugugugucguugcaggccuuauucaagcuuaccauggccuuaaguaaaguaaaauuaaacgacacacuaaacaaagaccaauuacucucaucaucgaaauauacaauacaaagauccacaggagacuccauagauacaccaaauuacgacguacaaaaacauauaaacaaacucugcggaauguuauuaauaacagaagacgcaaaccacaaauucacaggagucauagguaugcuauacgcaaugucaagauuaggaagagaagauacaauaaaaauacuaagagacgcaggauaccacguaaaagcaaacggaguagacguaacaacacauagacaagauauaaacgguaaagaaaugaaauucgaaguacuaacacuagccagucuaacaacagaaauacaaauaaacauagaaauagaaagccgaaaaucauacaaaaaaauguuaaaagaaaugggggaaguagcacccgaauacagacaugauucaccugacugcggaaugauaauacucugcauagcggcauuagucauaacaaaacuagccgcaggagacagaagcggauuaacagcaguaauaagaagagcaaauaauguauuaaaaaaugaaaugaaaagguauaaaggauuacuaccaaaagauauagcaaacucauucuaugaaguuuucgaaaaauacccacacuucauagacgucuucguacacuuuggaauagcacaaagcagcacaagaggaggaagcagaguagaaggaauauucgcaggacuauucaugaaugcauacggagccggacaaguaaugcuaagauggggaguuuuagcaaaaagcguaaaaaacauaauguuaggacacgccuccguccaagccgaaauggaacaaguaguagaaguauacgaauaugcacaaaaacuaggaggagaagcaggauucuaucacauacucaauaacccaaaagcaucacuauugagcuuaacacaauucccacauuuuucauccguaguccuaggaaaugcagcaggcuuaggaauaaugggagaauacagaggcacaccaagaaaucaagacuuauacgaugcagcaaaagcauacgcagaacaacuaaaagaaaacggaguaauaaacuacucaguauuagauuuaacagcagaagaauuagaagcaauaaaacaucaacuaaauccuaaggauaaugauguagaacucuaaggacuagucccuguucccagagcccacuuuuuuuucuuuuuuugaaauaaaauagccugucuuucagaucuaaaaaaaaaaaaaaaaaaaaaaaaaaaaaaaaaaaaaaaaaaaaaaaaaaaaaaaaaaaaaaaaugcaucccccccccccccccccccccccccccccccaaaggcucuuuucagagccaccagaauu

SEQ ID NO: 20229 - RNA, 1452 nt, Artificial Sequence
  mRNA product Design a-1 comprising derived and/or modified sequence from HRSV(Memphis-37)__AIY60635.1__N (opt11)
gggagagucccgcagucggcguccagcggcucugcuuguucgugugugugucguugcaggccuuauucaagcuuaccauggcccuaagcaaagucaaacucaacgacacacuaaacaaagaccaacuccucagcuccagcaaauacaccauccaacgauccaccggcgacuccauagacacccccaacuacgacguccaaaaacacaucaacaaacuaugcggcaugcuccuaaucacagaagacgccaaccacaaauucaccggagucaucggcaugcucuacgccaugagccgccucggccgagaagacacaaucaaaauacuaagagacgccggcuaccacguaaaagccaacggcguagacguaaccacccaccgccaagacaucaacggcaaagaaaugaaauucgaaguucucacccucgccucacuaaccacggaaauccaaauaaacauugaaaucgaaagcagaaaauccuacaaaaagaugcuaaaagaaaugggcgagguagccccagaauaccgccacgacagccccgacugcggaaugaucauccucugcauugcagcccucgucaucaccaaacuagccgccggcgacagaagcggccuaaccgcaguaauccgccgagccaacaacguacucaaaaacgaaaugaaacgcuacaaaggccuccuccccaaagacaucgccaacagcuucuacgaaguauucgaaaaauacccgcacuucaucgacgucuucguacacuucggcauagcccaaagcagcacacgaggcggcucccgcgucgaaggaauauucgccggccuguucaugaacgcauacggagcgggccaagucaugcuccgcugggguguacuagccaaguccgucaaaaacaucaugcuagggcacgcaagcguacaagccgaaauggaacaaguagucgaagucuacgaauacgcacaaaaacuaggcggcgaagccggcuucuaccacauccuaaacaaccccaaagccucauuacucucccucacccaauuuccucacuucuccagcgucguccucggaaacgccgccggccuaggcauaaugggggaauaccgcggcaccccgcgcaaccaagaccucuacgacgcagcaaaagccuacgcagaacaacuaaaagaaaacggagucaucaacuacagcguacuggaccuaaccgccgaagaacucgaagccauaaaacaccaacucaaccccaaagacaacgacgucgagcucuaaggacuagucccuguucccagagcccacuuuuuuuucuuuuuuugaaauaaaauagccugucuuucagaucuaaaaaaaaaaaaaaaaaaaaaaaaaaaaaaaaaaaaaaaaaaaaaaaaaaaaaaaaaaaaaaaaugcaucccccccccccccccccccccccccccccccaaaggcucuuuucagagccaccagaauu

SEQ ID NO: 20230 - RNA, 1471 nt, Artificial Sequence
  mRNA product Design a-2 comprising derived and/or modified sequence from HRSV(Memphis-37)__AIY60635.1__N (wt)
gggagaguccgcucagccagguugcagaagcggcuuagcguguguccuaaucuucucucugcguguagguaggccugugccgcaaacaagcuuaccauggcucuuagcaaagucaaguugaacgauacacucaacaaagaucaacuucugucauccagcaaauacaccauccaacggagcacaggagauaguauugauacuccuaauuaugaugugcagaaacacaucaacaaguuauguggcauguuauuaaucacagaagaugcuaaucauaaauucacugggguaauagguauguuauaugcuaugucuagauuaggaagagaagacaccauaaaaauacucagagaugcgggauaucauguaaaagcaaauggaguggauguaacaacacaucgucaagacauuaauggaaaagaaaugaaauuugaaguguuaacauuggcaagcuuaacaacugaaauucaaaucaacauugagauagaaucuaggaaauccuacaaaaaaaugcuaaaagaaaugggagagguggcuccagaauacaggcaugacucuccugauuguggaaugauaauauuauguauagcagcauuaguaauaaccaaauuagcagcaggggauagaucuggucuuacugcugugauuaggagagcuaauaauguucuaaaaaaugaaaugaaacguuauaaaggcuuacuaccaaaggauauagccaacagcuucuaugaaguguuugaaaaauauccucacuuuauagauguuuuuguucauuuugguauagcacaaucuucuaccagagguggcaguagaguugaagggauuuuugcaggauuguuuaugaaugccuauggugcagggcaagugauguuacgguggggagucuuagcaaaaucaguuaaaaauauuaugcuaggacaugcuagugugcaagcagaaauggaacaaguuguggaaguuuaugaauaugcccaaaaauuggguggagaagcaggauucuaccauauauugaacaauccaaaagcaucauuauuaucuuugacucaauuuccccacuucuccaguguaguauugggcaaugcugcuggccuaggcauaaugggagaauacagagguacaccaaggaaucaagaucuauaugaugcugcaaaggcauaugcugaacaacucaaagaaaauggugugauuaacuacaguguauuagacuugacagcagaagaacuagaggcuaucaaacaucagcuuaauccaaaagauaaugauguagagcuuugaggacuagucccuguucccagagcccacuuuuuuuucuuuuuuugaaauaaaauagccugucuuucagaucuaaaaaaaaaaaaaaaaaaaaaaaaaaaaaaaaaaaaaaaaaaaaaaaaaaaaaaaaaaaaaaaaugcaucccccccccccccccccccccccccccccccaaaggcucuuuucagagccaccagaauu

SEQ ID NO: 20231 - RNA, 1471 nt, Artificial Sequence
  mRNA product Design a-2 comprising derived and/or modified sequence from HRSV(Memphis-37)__AIY60635.1__N (opt1)
gggagaguccgcucagccagguugcagaagcggcuuagcguguguccuaaucuucucucugcguguagguaggccugugccgcaaacaagcuuaccauggcccugagcaaggugaagcucaacgacacccugaacaaggaccagcugcucuccagcuccaaguacaccauccagcgcagcaccggcgacuccaucgacacccccaacuacgacguccagaagcacaucaacaagcugugcgggaugcugcucaucaccgaggacgccaaccacaaguucaccggcgugaucgggaugcuguacgcgaugagccggcugggccgcgaggacacgaucaagauccuccgggacgccggguaccacgugaaggccaacggcgucgacgugaccacccaccgccaggacaucaacggcaaggagaugaaguucgaggugcugacccuggccucccucacgaccgagauccagaucaacaucgagaucgagagccggaaguccuacaagaagaugcugaaggagaugggggaggucgccccggaguaccgccacgacagccccgacugcggcaugaucauccugugcaucgcggcccucgugaucaccaagcuggccgccggggaccgguccggccugaccgcggugauccgccgggccaacaacguccucaagaacgagaugaagcgcuacaaggggcugcugcccaaggacaucgccaacagcuucuacgagguguucgagaaguacccccacuucaucgacguguucguccacuucggcaucgcccaguccagcacgcggggcgggucccgcguggagggcaucuucgccgggcuguucaugaacgcguacggcgccggccaggugaugcugcgguggggcguccuggccaagagcgugaagaacaucaugcucgggcacgccuccgugcaggccgagauggagcaggucguggagguguacgaguacgcgcagaagcucgggggcgaggccggguucuaccacauccugaacaacccgaaggccagccuccugucccugacccaguucccccacuucagcagcgucgugcucggcaacgccgccggccuggggaucaugggcgaguaccgcgggacgccccggaaccaggaccuguacgacgcggccaaggccuacgccgagcagcucaaggagaacggcgugaucaacuacuccguccuggaccugaccgccgaggagcucgaggcgaucaagcaccagcugaaccccaaggacaacgacguggagcugugaggacuagucccuguucccagagcccacuuuuuuuucuuuuuuugaaauaaaauagccugucuuucagaucuaaaaaaaaaaaaaaaaaaaaaaaaaaaaaaaaaaaaaaaaaaaaaaaaaaaaaaaaaaaaaaaaugcaucccccccccccccccccccccccccccccccaaaggcucuuuucagagccaccagaauu

SEQ ID NO: 20232 - RNA, 1471 nt, Artificial Sequence
  mRNA product Design a-2 comprising derived and/or modified sequence from HRSV(Memphis-37)__AIY60635.1__N (opt2)
gggagaguccgcucagccagguugcagaagcggcuuagcguguguccuaaucuucucucugcguguagguaggccugugccgcaaacaagcuuaccauggcccucuccaaggucaagcucaacgacacccucaacaaggaccagcuccucuccuccuccaaguacaccauccagcgcuccaccggcgacuccaucgacacccccaacuacgacguccagaagcacaucaacaagcucugcggcaugcuccucaucaccgaggacgccaaccacaaguucaccggcgucaucggcaugcucuacgccaugucccgccucggccgcgaggacaccaucaagauccuccgcgacgccggcuaccacgucaaggccaacggcgucgacgucaccacccaccgccaggacaucaacggcaaggagaugaaguucgagguccucacccucgccucccucaccaccgagauccagaucaacaucgagaucgagucccgcaaguccuacaagaagaugcucaaggagaugggcgaggucgcccccgaguaccgccacgacucccccgacugcggcaugaucauccucugcaucgccgcccucgucaucaccaagcucgccgccggcgaccgcuccggccucaccgccgucauccgccgcgccaacaacguccucaagaacgagaugaagcgcuacaagggccuccuccccaaggacaucgccaacuccuucuacgaggucuucgagaaguacccccacuucaucgacgucuucguccacuucggcaucgcccaguccuccacccgcggcggcucccgcgucgagggcaucuucgccggccucuucaugaacgccuacggcgccggccaggucaugcuccgcuggggcguccucgccaaguccgucaagaacaucaugcucggccacgccuccguccaggccgagauggagcaggucgucgaggucuacgaguacgcccagaagcucggcggcgaggccggcuucuaccacauccucaacaaccccaaggccucccuccucucccucacccaguucccccacuucuccuccgucguccucggcaacgccgccggccucggcaucaugggcgaguaccgcggcaccccccgcaaccaggaccucuacgacgccgccaaggccuacgccgagcagcucaaggagaacggcgucaucaacuacuccguccucgaccucaccgccgaggagcucgaggccaucaagcaccagcucaaccccaaggacaacgacgucgagcucugaggacuagucccuguucccagagcccacuuuuuuuucuuuuuuugaaauaaaauagccugucuuucagaucuaaaaaaaaaaaaaaaaaaaaaaaaaaaaaaaaaaaaaaaaaaaaaaaaaaaaaaaaaaaaaaaaugcaucccccccccccccccccccccccccccccccaaaggcucuuuucagagccaccagaauu

SEQ ID NO: 20233 - RNA, 1471 nt, Artificial Sequence
  mRNA product Design a-2 comprising derived and/or modified sequence from HRSV(Memphis-37)__AIY60635.1__N (opt3)
gggagaguccgcucagccagguugcagaagcggcuuagcguguguccuaaucuucucucugcguguagguaggccugugccgcaaacaagcuuaccauggcccugagcaaggugaaacucaacgacacccuuaauaaggaucagcuguuguccucuucaaaauacacaauccaaagaaguacuggcgacagcauugauacgcccaacuaugacguccagaagcacauaaauaaauuaugcgggaugcugcuaaucaccgaggaugcuaaccauaaguucacaggaguuauugguaugcucuacgcaauguccaggcugggccgggaagacacuaucaagauucuucgcgaugccggguaucacgugaaagcgaauggaguagacgugaccacacaucgacaggauaucaacggcaaggagaugaaauuugaaguccugaccuuggcuucucucacuacagagauacagaucaauauugaaaucgagucgcguaagucauacaaaaagaugcugaaggagaugggugaaguggccccugaguauagacacgacagcccagauugugggaugauuauccugugcauagcagcccucguuauuaccaaauuagcugcaggagacaggaguggccugacggccgugauccggcgcgcuaacaauguccuuaagaacgaaaugaaaagauacaagggcuugcugccgaaagauauugccaauuccuucuaugagguguuugagaaguacccccauuucaucgacguauuuguucacuucgggaucgcgcaaucuagcacuaggggagguucccggguggaaggcauuuuugcagggcuauucaugaacgccuacggagcuggccaggucaugcuccgcuggggugugcuggccaaaucagugaagaauauaaugcuugggcacgcaaguguccaggcugagauggaacagguuguggagguauaugaauacgcccaaaagcugggaggcgaggcgggcuuuuaucauaucuugaacaauccuaaagccagccuccugucuuuaacccaguucccacacuuuuccucagugguccuggggaacgcagcuggacucgguauuaugggcgaguaccgagggacacccagaaaccaggaccuuuaugaugccgcuaaggccuacgcagaacagcugaaagagaauggagugaucaacuauagcguuuuggaccuaacugccgaggaacuggaagcuauaaagcaucaacucaauccuaaagauaacgacguggagcugugaggacuagucccuguucccagagcccacuuuuuuuucuuuuuuugaaauaaaauagccugucuuucagaucuaaaaaaaaaaaaaaaaaaaaaaaaaaaaaaaaaaaaaaaaaaaaaaaaaaaaaaaaaaaaaaaaugcaucccccccccccccccccccccccccccccccaaaggcucuuuucagagccaccagaauu

SEQ ID NO: 20234 - RNA, 1471 nt, Artificial Sequence
  mRNA product Design a-2 comprising derived and/or modified sequence from HRSV(Memphis-37)__AIY60635.1__N (opt4)
gggagaguccgcucagccagguugcagaagcggcuuagcguguguccuaaucuucucucugcguguagguaggccugugccgcaaacaagcuuaccauggcccugagcaaggugaagcugaacgacacccugaacaaggaccagcugcugagcagcagcaaguacaccauccagagaagcaccggcgacagcaucgacacccccaacuacgacgugcagaagcacaucaacaagcugugcggcaugcugcugaucaccgaggacgccaaccacaaguucaccggcgugaucggcaugcuguacgccaugagcagacugggcagagaggacaccaucaagauccugagagacgccggcuaccacgugaaggccaacggcguggacgugaccacccacagacaggacaucaacggcaaggagaugaaguucgaggugcugacccuggccagccugaccaccgagauccagaucaacaucgagaucgagagcagaaagagcuacaagaagaugcugaaggagaugggcgagguggcccccgaguacagacacgacagccccgacugcggcaugaucauccugugcaucgccgcccuggugaucaccaagcuggccgccggcgacagaagcggccugaccgccgugaucagaagagccaacaacgugcugaagaacgagaugaagagauacaagggccugcugcccaaggacaucgccaacagcuucuacgagguguucgagaaguacccccacuucaucgacguguucgugcacuucggcaucgcccagagcagcaccagaggcggcagcagaguggagggcaucuucgccggccuguucaugaacgccuacggcgccggccaggugaugcugagauggggcgugcuggccaagagcgugaagaacaucaugcugggccacgccagcgugcaggccgagauggagcaggugguggagguguacgaguacgcccagaagcugggcggcgaggccggcuucuaccacauccugaacaaccccaaggccagccugcugagccugacccaguucccccacuucagcagcguggugcugggcaacgccgccggccugggcaucaugggcgaguacagaggcacccccagaaaccaggaccuguacgacgccgccaaggccuacgccgagcagcugaaggagaacggcgugaucaacuacagcgugcuggaccugaccgccgaggagcuggaggccaucaagcaccagcugaaccccaaggacaacgacguggagcugugaggacuagucccuguucccagagcccacuuuuuuuucuuuuuuugaaauaaaauagccugucuuucagaucuaaaaaaaaaaaaaaaaaaaaaaaaaaaaaaaaaaaaaaaaaaaaaaaaaaaaaaaaaaaaaaaaugcaucccccccccccccccccccccccccccccccaaaggcucuuuucagagccaccagaauu

SEQ ID NO: 20235 - RNA, 1471 nt, Artificial Sequence
  mRNA product Design a-2 comprising derived and/or modified sequence from HRSV(Memphis-37)__AIY60635.1__N (opt5)
gggagaguccgcucagccagguugcagaagcggcuuagcguguguccuaaucuucucucugcguguagguaggccugugccgcaaacaagcuuaccauggcccugagcaaggugaaacucaacgacacccugaauaaggaucagcuucuguccucuagcaaauacacaauccaaagauccacgggcgacucuauugauacccccaacuaugacguccagaagcacaucaauaaacucugcgggaugcugcuuauuacagaggaugcuaaccauaaguucaccggaguuaucggcaugcuguacgccaugagccggcucgggcgcgaagacacaauuaagauccugagagaugcgggauaucacgugaaagcuaauggcguggacgucaccacacaucggcaggauaucaacgggaaggagaugaaauuugaagugcugacccucgccucccugacgaccgagauucagaucaauauugaaaucgagucucgcaagagcuacaaaaagaugcuuaaggagaugggagaaguugccccugaguauagacacgacuccccggauuguggcaugauuauccugugcauugcugcccucgugaucacaaaacuggcugccggcgaccggagcgggcuuaccgcggucauccgcagagccaacaaugugcugaagaacgaaaugaaacgguacaagggacuccugcccaaagauauugcuaauucuuucuaugagguuuuugagaaguacccucauuucaucgacguguuuguccacuucggcauugcccaauccagcacacgcgggggaucuagaguggaaggcaucuuugcugggcuguucaugaacgccuacggagcgggccaggugaugcuccgguggggcguccuggccaaauccguuaagaauauuaugcuugggcacgcuagcgugcaggccgagauggaacagguggucgagguguaugaauacgcucaaaagcugggaggcgaggccggguuuuaucauauccucaacaaucccaaagccucucugcuuucccugacccaguucccucacuuuagcuccguugugcucggaaacgcugcgggccuggggaucaugggagaguaccgcggcacgcccagaaaccaggaccuguaugaugccgcuaaggccuacgccgaacagcucaaagagaauggcgucauuaacuauucugugcuggaccuuacagcugaggaacuggaagccaucaagcaucaacucaauccuaaagauaacgacguugagcugugaggacuagucccuguucccagagcccacuuuuuuuucuuuuuuugaaauaaaauagccugucuuucagaucuaaaaaaaaaaaaaaaaaaaaaaaaaaaaaaaaaaaaaaaaaaaaaaaaaaaaaaaaaaaaaaaaugcaucccccccccccccccccccccccccccccccaaaggcucuuuucagagccaccagaauu

SEQ ID NO: 20236 - RNA, 1471 nt, Artificial Sequence
  mRNA product Design a-2 comprising derived and/or modified sequence from HRSV(Memphis-37)__AIY60635.1__N (opt6)
gggagaguccgcucagccagguugcagaagcggcuuagcguguguccuaaucuucucucugcguguagguaggccugugccgcaaacaagcuuaccauggccuuaaguaaaguaaaauuaaacgacacacuaaacaaagaccaauuacucucaucaucgaaauauacaauacaaagauccacaggagacuccauagauacaccaaauuacgacguacaaaaacauauaaacaaacucugcggaauguuauuaauaacagaagacgcaaaccacaaauucacaggagucauagguaugcuauacgcaaugucaagauuaggaagagaagauacaauaaaaauacuaagagacgcaggauaccacguaaaagcaaacggaguagacguaacaacacauagacaagauauaaacgguaaagaaaugaaauucgaaguacuaacacuagccagucuaacaacagaaauacaaauaaacauagaaauagaaagccgaaaaucauacaaaaaaauguuaaaagaaaugggggaaguagcacccgaauacagacaugauucaccugacugcggaaugauaauacucugcauagcggcauuagucauaacaaaacuagccgcaggagacagaagcggauuaacagcaguaauaagaagagcaaauaauguauuaaaaaaugaaaugaaaagguauaaaggauuacuaccaaaagauauagcaaacucauucuaugaaguuuucgaaaaauacccacacuucauagacgucuucguacacuuuggaauagcacaaagcagcacaagaggaggaagcagaguagaaggaauauucgcaggacuauucaugaaugcauacggagccggacaaguaaugcuaagauggggaguuuuagcaaaaagcguaaaaaacauaauguuaggacacgccuccguccaagccgaaauggaacaaguaguagaaguauacgaauaugcacaaaaacuaggaggagaagcaggauucuaucacauacucaauaacccaaaagcaucacuauugagcuuaacacaauucccacauuuuucauccguaguccuaggaaaugcagcaggcuuaggaauaaugggagaauacagaggcacaccaagaaaucaagacuuauacgaugcagcaaaagcauacgcagaacaacuaaaagaaaacggaguaauaaacuacucaguauuagauuuaacagcagaagaauuagaagcaauaaaacaucaacuaaauccuaaggauaaugauguagaacucuaaggacuagucccuguucccagagcccacuuuuuuuucuuuuuuugaaauaaaauagccugucuuucagaucuaaaaaaaaaaaaaaaaaaaaaaaaaaaaaaaaaaaaaaaaaaaaaaaaaaaaaaaaaaaaaaaaugcaucccccccccccccccccccccccccccccccaaaggcucuuuucagagccaccagaauu

SEQ ID NO: 20237 - RNA, 1471 nt, Artificial Sequence
  mRNA product Design a-2 comprising derived and/or modified sequence from HRSV(Memphis-37)__AIY60635.1__N (opt11)
gggagaguccgcucagccagguugcagaagcggcuuagcguguguccuaaucuucucucugcguguagguaggccugugccgcaaacaagcuuaccauggcccuaagcaaagucaaacucaacgacacacuaaacaaagaccaacuccucagcuccagcaaauacaccauccaacgauccaccggcgacuccauagacacccccaacuacgacguccaaaaacacaucaacaaacuaugcggcaugcuccuaaucacagaagacgccaaccacaaauucaccggagucaucggcaugcucuacgccaugagccgccucggccgagaagacacaaucaaaauacuaagagacgccggcuaccacguaaaagccaacggcguagacguaaccacccaccgccaagacaucaacggcaaagaaaugaaauucgaaguucucacccucgccucacuaaccacggaaauccaaauaaacauugaaaucgaaagcagaaaauccuacaaaaagaugcuaaaagaaaugggcgagguagccccagaauaccgccacgacagccccgacugcggaaugaucauccucugcauugcagcccucgucaucaccaaacuagccgccggcgacagaagcggccuaaccgcaguaauccgccgagccaacaacguacucaaaaacgaaaugaaacgcuacaaaggccuccuccccaaagacaucgccaacagcuucuacgaaguauucgaaaaauacccgcacuucaucgacgucuucguacacuucggcauagcccaaagcagcacacgaggcggcucccgcgucgaaggaauauucgccggccuguucaugaacgcauacggagcgggccaagucaugcuccgcugggguguacuagccaaguccgucaaaaacaucaugcuagggcacgcaagcguacaagccgaaauggaacaaguagucgaagucuacgaauacgcacaaaaacuaggcggcgaagccggcuucuaccacauccuaaacaaccccaaagccucauuacucucccucacccaauuuccucacuucuccagcgucguccucggaaacgccgccggccuaggcauaaugggggaauaccgcggcaccccgcgcaaccaagaccucuacgacgcagcaaaagccuacgcagaacaacuaaaagaaaacggagucaucaacuacagcguacuggaccuaaccgccgaagaacucgaagccauaaaacaccaacucaaccccaaagacaacgacgucgagcucuaaggacuagucccuguucccagagcccacuuuuuuuucuuuuuuugaaauaaaauagccugucuuucagaucuaaaaaaaaaaaaaaaaaaaaaaaaaaaaaaaaaaaaaaaaaaaaaaaaaaaaaaaaaaaaaaaaugcaucccccccccccccccccccccccccccccccaaaggcucuuuucagagccaccagaauu

SEQ ID NO: 20238 - RNA, 1549 nt, Artificial Sequence
  mRNA product Design a-3 comprising derived and/or modified sequence from HRSV(Memphis-37)__AIY60635.1__N (wt)
gggagagggcgcuuggcuugcaaggacccugagcugcggcauugaagcacacccaacccaacucgacugaagucagccucacugaaccggaucugagaaucuucucucucugggcuugccagggcucuccgaaccuagcuagcauccucuucaauuccaacuagaaagcuuaccauggcucuuagcaaagucaaguugaacgauacacucaacaaagaucaacuucugucauccagcaaauacaccauccaacggagcacaggagauaguauugauacuccuaauuaugaugugcagaaacacaucaacaaguuauguggcauguuauuaaucacagaagaugcuaaucauaaauucacugggguaauagguauguuauaugcuaugucuagauuaggaagagaagacaccauaaaaauacucagagaugcgggauaucauguaaaagcaaauggaguggauguaacaacacaucgucaagacauuaauggaaaagaaaugaaauuugaaguguuaacauuggcaagcuuaacaacugaaauucaaaucaacauugagauagaaucuaggaaauccuacaaaaaaaugcuaaaagaaaugggagagguggcuccagaauacaggcaugacucuccugauuguggaaugauaauauuauguauagcagcauuaguaauaaccaaauuagcagcaggggauagaucuggucuuacugcugugauuaggagagcuaauaauguucuaaaaaaugaaaugaaacguuauaaaggcuuacuaccaaaggauauagccaacagcuucuaugaaguguuugaaaaauauccucacuuuauagauguuuuuguucauuuugguauagcacaaucuucuaccagagguggcaguagaguugaagggauuuuugcaggauuguuuaugaaugccuauggugcagggcaagugauguuacgguggggagucuuagcaaaaucaguuaaaaauauuaugcuaggacaugcuagugugcaagcagaaauggaacaaguuguggaaguuuaugaauaugcccaaaaauuggguggagaagcaggauucuaccauauauugaacaauccaaaagcaucauuauuaucuuugacucaauuuccccacuucuccaguguaguauugggcaaugcugcuggccuaggcauaaugggagaauacagagguacaccaaggaaucaagaucuauaugaugcugcaaaggcauaugcugaacaacucaaagaaaauggugugauuaacuacaguguauuagacuugacagcagaagaacuagaggcuaucaaacaucagcuuaauccaaaagauaaugauguagagcuuugaggacuagucccuguucccagagcccacuuuuuuuucuuuuuuugaaauaaaauagccugucuuucagaucuaaaaaaaaaaaaaaaaaaaaaaaaaaaaaaaaaaaaaaaaaaaaaaaaaaaaaaaaaaaaaaaaugcaucccccccccccccccccccccccccccccccaaaggcucuuuucagagccaccagaauu

SEQ ID NO: 20239 - RNA, 1549 nt, Artificial Sequence
  mRNA product Design a-3 comprising derived and/or modified sequence from HRSV(Memphis-37)__AIY60635.1__N (opt1)
gggagagggcgcuuggcuugcaaggacccugagcugcggcauugaagcacacccaacccaacucgacugaagucagccucacugaaccggaucugagaaucuucucucucugggcuugccagggcucuccgaaccuagcuagcauccucuucaauuccaacuagaaagcuuaccauggcccugagcaaggugaagcucaacgacacccugaacaaggaccagcugcucuccagcuccaaguacaccauccagcgcagcaccggcgacuccaucgacacccccaacuacgacguccagaagcacaucaacaagcugugcgggaugcugcucaucaccgaggacgccaaccacaaguucaccggcgugaucgggaugcuguacgcgaugagccggcugggccgcgaggacacgaucaagauccuccgggacgccggguaccacgugaaggccaacggcgucgacgugaccacccaccgccaggacaucaacggcaaggagaugaaguucgaggugcugacccuggccucccucacgaccgagauccagaucaacaucgagaucgagagccggaaguccuacaagaagaugcugaaggagaugggggaggucgccccggaguaccgccacgacagccccgacugcggcaugaucauccugugcaucgcggcccucgugaucaccaagcuggccgccggggaccgguccggccugaccgcggugauccgccgggccaacaacguccucaagaacgagaugaagcgcuacaaggggcugcugcccaaggacaucgccaacagcuucuacgagguguucgagaaguacccccacuucaucgacguguucguccacuucggcaucgcccaguccagcacgcggggcgggucccgcguggagggcaucuucgccgggcuguucaugaacgcguacggcgccggccaggugaugcugcgguggggcguccuggccaagagcgugaagaacaucaugcucgggcacgccuccgugcaggccgagauggagcaggucguggagguguacgaguacgcgcagaagcucgggggcgaggccggguucuaccacauccugaacaacccgaaggccagccuccugucccugacccaguucccccacuucagcagcgucgugcucggcaacgccgccggccuggggaucaugggcgaguaccgcgggacgccccggaaccaggaccuguacgacgcggccaaggccuacgccgagcagcucaaggagaacggcgugaucaacuacuccguccuggaccugaccgccgaggagcucgaggcgaucaagcaccagcugaaccccaaggacaacgacguggagcugugaggacuagucccuguucccagagcccacuuuuuuuucuuuuuuugaaauaaaauagccugucuuucagaucuaaaaaaaaaaaaaaaaaaaaaaaaaaaaaaaaaaaaaaaaaaaaaaaaaaaaaaaaaaaaaaaaugcaucccccccccccccccccccccccccccccccaaaggcucuuuucagagccaccagaauu

SEQ ID NO: 20240 - RNA, 1549 nt, Artificial Sequence
  mRNA product Design a-3 comprising derived and/or modified sequence from HRSV(Memphis-37)__AIY60635.1__N (opt2)
gggagagggcgcuuggcuugcaaggacccugagcugcggcauugaagcacacccaacccaacucgacugaagucagccucacugaaccggaucugagaaucuucucucucugggcuugccagggcucuccgaaccuagcuagcauccucuucaauuccaacuagaaagcuuaccauggcccucuccaaggucaagcucaacgacacccucaacaaggaccagcuccucuccuccuccaaguacaccauccagcgcuccaccggcgacuccaucgacacccccaacuacgacguccagaagcacaucaacaagcucugcggcaugcuccucaucaccgaggacgccaaccacaaguucaccggcgucaucggcaugcucuacgccaugucccgccucggccgcgaggacaccaucaagauccuccgcgacgccggcuaccacgucaaggccaacggcgucgacgucaccacccaccgccaggacaucaacggcaaggagaugaaguucgagguccucacccucgccucccucaccaccgagauccagaucaacaucgagaucgagucccgcaaguccuacaagaagaugcucaaggagaugggcgaggucgcccccgaguaccgccacgacucccccgacugcggcaugaucauccucugcaucgccgcccucgucaucaccaagcucgccgccggcgaccgcuccggccucaccgccgucauccgccgcgccaacaacguccucaagaacgagaugaagcgcuacaagggccuccuccccaaggacaucgccaacuccuucuacgaggucuucgagaaguacccccacuucaucgacgucuucguccacuucggcaucgcccaguccuccacccgcggcggcucccgcgucgagggcaucuucgccggccucuucaugaacgccuacggcgccggccaggucaugcuccgcuggggcguccucgccaaguccgucaagaacaucaugcucggccacgccuccguccaggccgagauggagcaggucgucgaggucuacgaguacgcccagaagcucggcggcgaggccggcuucuaccacauccucaacaaccccaaggccucccuccucucccucacccaguucccccacuucuccuccgucguccucggcaacgccgccggccucggcaucaugggcgaguaccgcggcaccccccgcaaccaggaccucuacgacgccgccaaggccuacgccgagcagcucaaggagaacggcgucaucaacuacuccguccucgaccucaccgccgaggagcucgaggccaucaagcaccagcucaaccccaaggacaacgacgucgagcucugaggacuagucccuguucccagagcccacuuuuuuuucuuuuuuugaaauaaaauagccugucuuucagaucuaaaaaaaaaaaaaaaaaaaaaaaaaaaaaaaaaaaaaaaaaaaaaaaaaaaaaaaaaaaaaaaaugcaucccccccccccccccccccccccccccccccaaaggcucuuuucagagccaccagaauu

SEQ ID NO: 20241 - RNA, 1549 nt, Artificial Sequence
  mRNA product Design a-3 comprising derived and/or modified sequence from HRSV(Memphis-37)__AIY60635.1__N (opt3)
gggagagggcgcuuggcuugcaaggacccugagcugcggcauugaagcacacccaacccaacucgacugaagucagccucacugaaccggaucugagaaucuucucucucugggcuugccagggcucuccgaaccuagcuagcauccucuucaauuccaacuagaaagcuuaccauggcccugagcaaggugaaacucaacgacacccuuaauaaggaucagcuguuguccucuucaaaauacacaauccaaagaaguacuggcgacagcauugauacgcccaacuaugacguccagaagcacauaaauaaauuaugcgggaugcugcuaaucaccgaggaugcuaaccauaaguucacaggaguuauugguaugcucuacgcaauguccaggcugggccgggaagacacuaucaagauucuucgcgaugccggguaucacgugaaagcgaauggaguagacgugaccacacaucgacaggauaucaacggcaaggagaugaaauuugaaguccugaccuuggcuucucucacuacagagauacagaucaauauugaaaucgagucgcguaagucauacaaaaagaugcugaaggagaugggugaaguggccccugaguauagacacgacagcccagauugugggaugauuauccugugcauagcagcccucguuauuaccaaauuagcugcaggagacaggaguggccugacggccgugauccggcgcgcuaacaauguccuuaagaacgaaaugaaaagauacaagggcuugcugccgaaagauauugccaauuccuucuaugagguguuugagaaguacccccauuucaucgacguauuuguucacuucgggaucgcgcaaucuagcacuaggggagguucccggguggaaggcauuuuugcagggcuauucaugaacgccuacggagcuggccaggucaugcuccgcuggggugugcuggccaaaucagugaagaauauaaugcuugggcacgcaaguguccaggcugagauggaacagguuguggagguauaugaauacgcccaaaagcugggaggcgaggcgggcuuuuaucauaucuugaacaauccuaaagccagccuccugucuuuaacccaguucccacacuuuuccucagugguccuggggaacgcagcuggacucgguauuaugggcgaguaccgagggacacccagaaaccaggaccuuuaugaugccgcuaaggccuacgcagaacagcugaaagagaauggagugaucaacuauagcguuuuggaccuaacugccgaggaacuggaagcuauaaagcaucaacucaauccuaaagauaacgacguggagcugugaggacuagucccuguucccagagcccacuuuuuuuucuuuuuuugaaauaaaauagccugucuuucagaucuaaaaaaaaaaaaaaaaaaaaaaaaaaaaaaaaaaaaaaaaaaaaaaaaaaaaaaaaaaaaaaaaugcaucccccccccccccccccccccccccccccccaaaggcucuuuucagagccaccagaauu

SEQ ID NO: 20242 - RNA, 1549 nt, Artificial Sequence
  mRNA product Design a-3 comprising derived and/or modified sequence from HRSV(Memphis-37)__AIY60635.1__N (opt4)
gggagagggcgcuuggcuugcaaggacccugagcugcggcauugaagcacacccaacccaacucgacugaagucagccucacugaaccggaucugagaaucuucucucucugggcuugccagggcucuccgaaccuagcuagcauccucuucaauuccaacuagaaagcuuaccauggcccugagcaaggugaagcugaacgacacccugaacaaggaccagcugcugagcagcagcaaguacaccauccagagaagcaccggcgacagcaucgacacccccaacuacgacgugcagaagcacaucaacaagcugugcggcaugcugcugaucaccgaggacgccaaccacaaguucaccggcgugaucggcaugcuguacgccaugagcagacugggcagagaggacaccaucaagauccugagagacgccggcuaccacgugaaggccaacggcguggacgugaccacccacagacaggacaucaacggcaaggagaugaaguucgaggugcugacccuggccagccugaccaccgagauccagaucaacaucgagaucgagagcagaaagagcuacaagaagaugcugaaggagaugggcgagguggcccccgaguacagacacgacagccccgacugcggcaugaucauccugugcaucgccgcccuggugaucaccaagcuggccgccggcgacagaagcggccugaccgccgugaucagaagagccaacaacgugcugaagaacgagaugaagagauacaagggccugcugcccaaggacaucgccaacagcuucuacgagguguucgagaaguacccccacuucaucgacguguucgugcacuucggcaucgcccagagcagcaccagaggcggcagcagaguggagggcaucuucgccggccuguucaugaacgccuacggcgccggccaggugaugcugagauggggcgugcuggccaagagcgugaagaacaucaugcugggccacgccagcgugcaggccgagauggagcaggugguggagguguacgaguacgcccagaagcugggcggcgaggccggcuucuaccacauccugaacaaccccaaggccagccugcugagccugacccaguucccccacuucagcagcguggugcugggcaacgccgccggccugggcaucaugggcgaguacagaggcacccccagaaaccaggaccuguacgacgccgccaaggccuacgccgagcagcugaaggagaacggcgugaucaacuacagcgugcuggaccugaccgccgaggagcuggaggccaucaagcaccagcugaaccccaaggacaacgacguggagcugugaggacuagucccuguucccagagcccacuuuuuuuucuuuuuuugaaauaaaauagccugucuuucagaucuaaaaaaaaaaaaaaaaaaaaaaaaaaaaaaaaaaaaaaaaaaaaaaaaaaaaaaaaaaaaaaaaugcaucccccccccccccccccccccccccccccccaaaggcucuuuucagagccaccagaauu

SEQ ID NO: 20243 - RNA, 1549 nt, Artificial Sequence
  mRNA product Design a-3 comprising derived and/or modified sequence from HRSV(Memphis-37)__AIY60635.1__N (opt5)
gggagagggcgcuuggcuugcaaggacccugagcugcggcauugaagcacacccaacccaacucgacugaagucagccucacugaaccggaucugagaaucuucucucucugggcuugccagggcucuccgaaccuagcuagcauccucuucaauuccaacuagaaagcuuaccauggcccugagcaaggugaaacucaacgacacccugaauaaggaucagcuucuguccucuagcaaauacacaauccaaagauccacgggcgacucuauugauacccccaacuaugacguccagaagcacaucaauaaacucugcgggaugcugcuuauuacagaggaugcuaaccauaaguucaccggaguuaucggcaugcuguacgccaugagccggcucgggcgcgaagacacaauuaagauccugagagaugcgggauaucacgugaaagcuaauggcguggacgucaccacacaucggcaggauaucaacgggaaggagaugaaauuugaagugcugacccucgccucccugacgaccgagauucagaucaauauugaaaucgagucucgcaagagcuacaaaaagaugcuuaaggagaugggagaaguugccccugaguauagacacgacuccccggauuguggcaugauuauccugugcauugcugcccucgugaucacaaaacuggcugccggcgaccggagcgggcuuaccgcggucauccgcagagccaacaaugugcugaagaacgaaaugaaacgguacaagggacuccugcccaaagauauugcuaauucuuucuaugagguuuuugagaaguacccucauuucaucgacguguuuguccacuucggcauugcccaauccagcacacgcgggggaucuagaguggaaggcaucuuugcugggcuguucaugaacgccuacggagcgggccaggugaugcuccgguggggcguccuggccaaauccguuaagaauauuaugcuugggcacgcuagcgugcaggccgagauggaacagguggucgagguguaugaauacgcucaaaagcugggaggcgaggccggguuuuaucauauccucaacaaucccaaagccucucugcuuucccugacccaguucccucacuuuagcuccguugugcucggaaacgcugcgggccuggggaucaugggagaguaccgcggcacgcccagaaaccaggaccuguaugaugccgcuaaggccuacgccgaacagcucaaagagaauggcgucauuaacuauucugugcuggaccuuacagcugaggaacuggaagccaucaagcaucaacucaauccuaaagauaacgacguugagcugugaggacuagucccuguucccagagcccacuuuuuuuucuuuuuuugaaauaaaauagccugucuuucagaucuaaaaaaaaaaaaaaaaaaaaaaaaaaaaaaaaaaaaaaaaaaaaaaaaaaaaaaaaaaaaaaaaugcaucccccccccccccccccccccccccccccccaaaggcucuuuucagagccaccagaauu

SEQ ID NO: 20244 - RNA, 1549 nt, Artificial Sequence
  mRNA product Design a-3 comprising derived and/or modified sequence from HRSV(Memphis-37)__AIY60635.1__N (opt6)
gggagagggcgcuuggcuugcaaggacccugagcugcggcauugaagcacacccaacccaacucgacugaagucagccucacugaaccggaucugagaaucuucucucucugggcuugccagggcucuccgaaccuagcuagcauccucuucaauuccaacuagaaagcuuaccauggccuuaaguaaaguaaaauuaaacgacacacuaaacaaagaccaauuacucucaucaucgaaauauacaauacaaagauccacaggagacuccauagauacaccaaauuacgacguacaaaaacauauaaacaaacucugcggaauguuauuaauaacagaagacgcaaaccacaaauucacaggagucauagguaugcuauacgcaaugucaagauuaggaagagaagauacaauaaaaauacuaagagacgcaggauaccacguaaaagcaaacggaguagacguaacaacacauagacaagauauaaacgguaaagaaaugaaauucgaaguacuaacacuagccagucuaacaacagaaauacaaauaaacauagaaauagaaagccgaaaaucauacaaaaaaauguuaaaagaaaugggggaaguagcacccgaauacagacaugauucaccugacugcggaaugauaauacucugcauagcggcauuagucauaacaaaacuagccgcaggagacagaagcggauuaacagcaguaauaagaagagcaaauaauguauuaaaaaaugaaaugaaaagguauaaaggauuacuaccaaaagauauagcaaacucauucuaugaaguuuucgaaaaauacccacacuucauagacgucuucguacacuuuggaauagcacaaagcagcacaagaggaggaagcagaguagaaggaauauucgcaggacuauucaugaaugcauacggagccggacaaguaaugcuaagauggggaguuuuagcaaaaagcguaaaaaacauaauguuaggacacgccuccguccaagccgaaauggaacaaguaguagaaguauacgaauaugcacaaaaacuaggaggagaagcaggauucuaucacauacucaauaacccaaaagcaucacuauugagcuuaacacaauucccacauuuuucauccguaguccuaggaaaugcagcaggcuuaggaauaaugggagaauacagaggcacaccaagaaaucaagacuuauacgaugcagcaaaagcauacgcagaacaacuaaaagaaaacggaguaauaaacuacucaguauuagauuuaacagcagaagaauuagaagcaauaaaacaucaacuaaauccuaaggauaaugauguagaacucuaaggacuagucccuguucccagagcccacuuuuuuuucuuuuuuugaaauaaaauagccugucuuucagaucuaaaaaaaaaaaaaaaaaaaaaaaaaaaaaaaaaaaaaaaaaaaaaaaaaaaaaaaaaaaaaaaaugcaucccccccccccccccccccccccccccccccaaaggcucuuuucagagccaccagaauu

SEQ ID NO: 20245 - RNA, 1549 nt, Artificial Sequence
  mRNA product Design a-3 comprising derived and/or modified sequence from HRSV(Memphis-37)__AIY60635.1__N (opt11)
gggagagggcgcuuggcuugcaaggacccugagcugcggcauugaagcacacccaacccaacucgacugaagucagccucacugaaccggaucugagaaucuucucucucugggcuugccagggcucuccgaaccuagcuagcauccucuucaauuccaacuagaaagcuuaccauggcccuaagcaaagucaaacucaacgacacacuaaacaaagaccaacuccucagcuccagcaaauacaccauccaacgauccaccggcgacuccauagacacccccaacuacgacguccaaaaacacaucaacaaacuaugcggcaugcuccuaaucacagaagacgccaaccacaaauucaccggagucaucggcaugcucuacgccaugagccgccucggccgagaagacacaaucaaaauacuaagagacgccggcuaccacguaaaagccaacggcguagacguaaccacccaccgccaagacaucaacggcaaagaaaugaaauucgaaguucucacccucgccucacuaaccacggaaauccaaauaaacauugaaaucgaaagcagaaaauccuacaaaaagaugcuaaaagaaaugggcgagguagccccagaauaccgccacgacagccccgacugcggaaugaucauccucugcauugcagcccucgucaucaccaaacuagccgccggcgacagaagcggccuaaccgcaguaauccgccgagccaacaacguacucaaaaacgaaaugaaacgcuacaaaggccuccuccccaaagacaucgccaacagcuucuacgaaguauucgaaaaauacccgcacuucaucgacgucuucguacacuucggcauagcccaaagcagcacacgaggcggcucccgcgucgaaggaauauucgccggccuguucaugaacgcauacggagcgggccaagucaugcuccgcugggguguacuagccaaguccgucaaaaacaucaugcuagggcacgcaagcguacaagccgaaauggaacaaguagucgaagucuacgaauacgcacaaaaacuaggcggcgaagccggcuucuaccacauccuaaacaaccccaaagccucauuacucucccucacccaauuuccucacuucuccagcgucguccucggaaacgccgccggccuaggcauaaugggggaauaccgcggcaccccgcgcaaccaagaccucuacgacgcagcaaaagccuacgcagaacaacuaaaagaaaacggagucaucaacuacagcguacuggaccuaaccgccgaagaacucgaagccauaaaacaccaacucaaccccaaagacaacgacgucgagcucuaaggacuagucccuguucccagagcccacuuuuuuuucuuuuuuugaaauaaaauagccugucuuucagaucuaaaaaaaaaaaaaaaaaaaaaaaaaaaaaaaaaaaaaaaaaaaaaaaaaaaaaaaaaaaaaaaaugcaucccccccccccccccccccccccccccccccaaaggcucuuuucagagccaccagaauu

SEQ ID NO: 20246 - RNA, 1498 nt, Artificial Sequence
  mRNA product Design a-4 comprising derived and/or modified sequence from HRSV(Memphis-37)__AIY60635.1__N (wt)
gggagacuccugucgggcggaaguaggaggaguagaguuuaaaaacaguacucuuuuuccgguucgggacguaguugaagcaacgacaagccggauaaccgcucuugagacaggaagcuuaccauggcucuuagcaaagucaaguugaacgauacacucaacaaagaucaacuucugucauccagcaaauacaccauccaacggagcacaggagauaguauugauacuccuaauuaugaugugcagaaacacaucaacaaguuauguggcauguuauuaaucacagaagaugcuaaucauaaauucacugggguaauagguauguuauaugcuaugucuagauuaggaagagaagacaccauaaaaauacucagagaugcgggauaucauguaaaagcaaauggaguggauguaacaacacaucgucaagacauuaauggaaaagaaaugaaauuugaaguguuaacauuggcaagcuuaacaacugaaauucaaaucaacauugagauagaaucuaggaaauccuacaaaaaaaugcuaaaagaaaugggagagguggcuccagaauacaggcaugacucuccugauuguggaaugauaauauuauguauagcagcauuaguaauaaccaaauuagcagcaggggauagaucuggucuuacugcugugauuaggagagcuaauaauguucuaaaaaaugaaaugaaacguuauaaaggcuuacuaccaaaggauauagccaacagcuucuaugaaguguuugaaaaauauccucacuuuauagauguuuuuguucauuuugguauagcacaaucuucuaccagagguggcaguagaguugaagggauuuuugcaggauuguuuaugaaugccuauggugcagggcaagugauguuacgguggggagucuuagcaaaaucaguuaaaaauauuaugcuaggacaugcuagugugcaagcagaaauggaacaaguuguggaaguuuaugaauaugcccaaaaauuggguggagaagcaggauucuaccauauauugaacaauccaaaagcaucauuauuaucuuugacucaauuuccccacuucuccaguguaguauugggcaaugcugcuggccuaggcauaaugggagaauacagagguacaccaaggaaucaagaucuauaugaugcugcaaaggcauaugcugaacaacucaaagaaaauggugugauuaacuacaguguauuagacuugacagcagaagaacuagaggcuaucaaacaucagcuuaauccaaaagauaaugauguagagcuuugaggacuagucccuguucccagagcccacuuuuuuuucuuuuuuugaaauaaaauagccugucuuucagaucuaaaaaaaaaaaaaaaaaaaaaaaaaaaaaaaaaaaaaaaaaaaaaaaaaaaaaaaaaaaaaaaaugcaucccccccccccccccccccccccccccccccaaaggcucuuuucagagccaccagaauu

SEQ ID NO: 20247 - RNA, 1498 nt, Artificial Sequence
  mRNA product Design a-4 comprising derived and/or modified sequence from HRSV(Memphis-37)__AIY60635.1__N (opt1)
gggagacuccugucgggcggaaguaggaggaguagaguuuaaaaacaguacucuuuuuccgguucgggacguaguugaagcaacgacaagccggauaaccgcucuugagacaggaagcuuaccauggcccugagcaaggugaagcucaacgacacccugaacaaggaccagcugcucuccagcuccaaguacaccauccagcgcagcaccggcgacuccaucgacacccccaacuacgacguccagaagcacaucaacaagcugugcgggaugcugcucaucaccgaggacgccaaccacaaguucaccggcgugaucgggaugcuguacgcgaugagccggcugggccgcgaggacacgaucaagauccuccgggacgccggguaccacgugaaggccaacggcgucgacgugaccacccaccgccaggacaucaacggcaaggagaugaaguucgaggugcugacccuggccucccucacgaccgagauccagaucaacaucgagaucgagagccggaaguccuacaagaagaugcugaaggagaugggggaggucgccccggaguaccgccacgacagccccgacugcggcaugaucauccugugcaucgcggcccucgugaucaccaagcuggccgccggggaccgguccggccugaccgcggugauccgccgggccaacaacguccucaagaacgagaugaagcgcuacaaggggcugcugcccaaggacaucgccaacagcuucuacgagguguucgagaaguacccccacuucaucgacguguucguccacuucggcaucgcccaguccagcacgcggggcgggucccgcguggagggcaucuucgccgggcuguucaugaacgcguacggcgccggccaggugaugcugcgguggggcguccuggccaagagcgugaagaacaucaugcucgggcacgccuccgugcaggccgagauggagcaggucguggagguguacgaguacgcgcagaagcucgggggcgaggccggguucuaccacauccugaacaacccgaaggccagccuccugucccugacccaguucccccacuucagcagcgucgugcucggcaacgccgccggccuggggaucaugggcgaguaccgcgggacgccccggaaccaggaccuguacgacgcggccaaggccuacgccgagcagcucaaggagaacggcgugaucaacuacuccguccuggaccugaccgccgaggagcucgaggcgaucaagcaccagcugaaccccaaggacaacgacguggagcugugaggacuagucccuguucccagagcccacuuuuuuuucuuuuuuugaaauaaaauagccugucuuucagaucuaaaaaaaaaaaaaaaaaaaaaaaaaaaaaaaaaaaaaaaaaaaaaaaaaaaaaaaaaaaaaaaaugcaucccccccccccccccccccccccccccccccaaaggcucuuuucagagccaccagaauu

SEQ ID NO: 20248 - RNA, 1498 nt, Artificial Sequence
  mRNA product Design a-4 comprising derived and/or modified sequence from HRSV(Memphis-37)__AIY60635.1__N (opt2)
gggagacuccugucgggcggaaguaggaggaguagaguuuaaaaacaguacucuuuuuccgguucgggacguaguugaagcaacgacaagccggauaaccgcucuugagacaggaagcuuaccauggcccucuccaaggucaagcucaacgacacccucaacaaggaccagcuccucuccuccuccaaguacaccauccagcgcuccaccggcgacuccaucgacacccccaacuacgacguccagaagcacaucaacaagcucugcggcaugcuccucaucaccgaggacgccaaccacaaguucaccggcgucaucggcaugcucuacgccaugucccgccucggccgcgaggacaccaucaagauccuccgcgacgccggcuaccacgucaaggccaacggcgucgacgucaccacccaccgccaggacaucaacggcaaggagaugaaguucgagguccucacccucgccucccucaccaccgagauccagaucaacaucgagaucgagucccgcaaguccuacaagaagaugcucaaggagaugggcgaggucgcccccgaguaccgccacgacucccccgacugcggcaugaucauccucugcaucgccgcccucgucaucaccaagcucgccgccggcgaccgcuccggccucaccgccgucauccgccgcgccaacaacguccucaagaacgagaugaagcgcuacaagggccuccuccccaaggacaucgccaacuccuucuacgaggucuucgagaaguacccccacuucaucgacgucuucguccacuucggcaucgcccaguccuccacccgcggcggcucccgcgucgagggcaucuucgccggccucuucaugaacgccuacggcgccggccaggucaugcuccgcuggggcguccucgccaaguccgucaagaacaucaugcucggccacgccuccguccaggccgagauggagcaggucgucgaggucuacgaguacgcccagaagcucggcggcgaggccggcuucuaccacauccucaacaaccccaaggccucccuccucucccucacccaguucccccacuucuccuccgucguccucggcaacgccgccggccucggcaucaugggcgaguaccgcggcaccccccgcaaccaggaccucuacgacgccgccaaggccuacgccgagcagcucaaggagaacggcgucaucaacuacuccguccucgaccucaccgccgaggagcucgaggccaucaagcaccagcucaaccccaaggacaacgacgucgagcucugaggacuagucccuguucccagagcccacuuuuuuuucuuuuuuugaaauaaaauagccugucuuucagaucuaaaaaaaaaaaaaaaaaaaaaaaaaaaaaaaaaaaaaaaaaaaaaaaaaaaaaaaaaaaaaaaaugcaucccccccccccccccccccccccccccccccaaaggcucuuuucagagccaccagaauu

SEQ ID NO: 20249 - RNA, 1498 nt, Artificial Sequence
  mRNA product Design a-4 comprising derived and/or modified sequence from HRSV(Memphis-37)__AIY60635.1__N (opt3)
gggagacuccugucgggcggaaguaggaggaguagaguuuaaaaacaguacucuuuuuccgguucgggacguaguugaagcaacgacaagccggauaaccgcucuugagacaggaagcuuaccauggcccugagcaaggugaaacucaacgacacccuuaauaaggaucagcuguuguccucuucaaaauacacaauccaaagaaguacuggcgacagcauugauacgcccaacuaugacguccagaagcacauaaauaaauuaugcgggaugcugcuaaucaccgaggaugcuaaccauaaguucacaggaguuauugguaugcucuacgcaauguccaggcugggccgggaagacacuaucaagauucuucgcgaugccggguaucacgugaaagcgaauggaguagacgugaccacacaucgacaggauaucaacggcaaggagaugaaauuugaaguccugaccuuggcuucucucacuacagagauacagaucaauauugaaaucgagucgcguaagucauacaaaaagaugcugaaggagaugggugaaguggccccugaguauagacacgacagcccagauugugggaugauuauccugugcauagcagcccucguuauuaccaaauuagcugcaggagacaggaguggccugacggccgugauccggcgcgcuaacaauguccuuaagaacgaaaugaaaagauacaagggcuugcugccgaaagauauugccaauuccuucuaugagguguuugagaaguacccccauuucaucgacguauuuguucacuucgggaucgcgcaaucuagcacuaggggagguucccggguggaaggcauuuuugcagggcuauucaugaacgccuacggagcuggccaggucaugcuccgcuggggugugcuggccaaaucagugaagaauauaaugcuugggcacgcaaguguccaggcugagauggaacagguuguggagguauaugaauacgcccaaaagcugggaggcgaggcgggcuuuuaucauaucuugaacaauccuaaagccagccuccugucuuuaacccaguucccacacuuuuccucagugguccuggggaacgcagcuggacucgguauuaugggcgaguaccgagggacacccagaaaccaggaccuuuaugaugccgcuaaggccuacgcagaacagcugaaagagaauggagugaucaacuauagcguuuuggaccuaacugccgaggaacuggaagcuauaaagcaucaacucaauccuaaagauaacgacguggagcugugaggacuagucccuguucccagagcccacuuuuuuuucuuuuuuugaaauaaaauagccugucuuucagaucuaaaaaaaaaaaaaaaaaaaaaaaaaaaaaaaaaaaaaaaaaaaaaaaaaaaaaaaaaaaaaaaaugcaucccccccccccccccccccccccccccccccaaaggcucuuuucagagccaccagaauu

SEQ ID NO: 20250 - RNA, 1498 nt, Artificial Sequence
  mRNA product Design a-4 comprising derived and/or modified sequence from HRSV(Memphis-37)__AIY60635.1__N (opt4)
gggagacuccugucgggcggaaguaggaggaguagaguuuaaaaacaguacucuuuuuccgguucgggacguaguugaagcaacgacaagccggauaaccgcucuugagacaggaagcuuaccauggcccugagcaaggugaagcugaacgacacccugaacaaggaccagcugcugagcagcagcaaguacaccauccagagaagcaccggcgacagcaucgacacccccaacuacgacgugcagaagcacaucaacaagcugugcggcaugcugcugaucaccgaggacgccaaccacaaguucaccggcgugaucggcaugcuguacgccaugagcagacugggcagagaggacaccaucaagauccugagagacgccggcuaccacgugaaggccaacggcguggacgugaccacccacagacaggacaucaacggcaaggagaugaaguucgaggugcugacccuggccagccugaccaccgagauccagaucaacaucgagaucgagagcagaaagagcuacaagaagaugcugaaggagaugggcgagguggcccccgaguacagacacgacagccccgacugcggcaugaucauccugugcaucgccgcccuggugaucaccaagcuggccgccggcgacagaagcggccugaccgccgugaucagaagagccaacaacgugcugaagaacgagaugaagagauacaagggccugcugcccaaggacaucgccaacagcuucuacgagguguucgagaaguacccccacuucaucgacguguucgugcacuucggcaucgcccagagcagcaccagaggcggcagcagaguggagggcaucuucgccggccuguucaugaacgccuacggcgccggccaggugaugcugagauggggcgugcuggccaagagcgugaagaacaucaugcugggccacgccagcgugcaggccgagauggagcaggugguggagguguacgaguacgcccagaagcugggcggcgaggccggcuucuaccacauccugaacaaccccaaggccagccugcugagccugacccaguucccccacuucagcagcguggugcugggcaacgccgccggccugggcaucaugggcgaguacagaggcacccccagaaaccaggaccuguacgacgccgccaaggccuacgccgagcagcugaaggagaacggcgugaucaacuacagcgugcuggaccugaccgccgaggagcuggaggccaucaagcaccagcugaaccccaaggacaacgacguggagcugugaggacuagucccuguucccagagcccacuuuuuuuucuuuuuuugaaauaaaauagccugucuuucagaucuaaaaaaaaaaaaaaaaaaaaaaaaaaaaaaaaaaaaaaaaaaaaaaaaaaaaaaaaaaaaaaaaugcaucccccccccccccccccccccccccccccccaaaggcucuuuucagagccaccagaauu

SEQ ID NO: 20251 - RNA, 1498 nt, Artificial Sequence
  mRNA product Design a-4 comprising derived and/or modified sequence from HRSV(Memphis-37)__AIY60635.1__N (opt5)
gggagacuccugucgggcggaaguaggaggaguagaguuuaaaaacaguacucuuuuuccgguucgggacguaguugaagcaacgacaagccggauaaccgcucuugagacaggaagcuuaccauggcccugagcaaggugaaacucaacgacacccugaauaaggaucagcuucuguccucuagcaaauacacaauccaaagauccacgggcgacucuauugauacccccaacuaugacguccagaagcacaucaauaaacucugcgggaugcugcuuauuacagaggaugcuaaccauaaguucaccggaguuaucggcaugcuguacgccaugagccggcucgggcgcgaagacacaauuaagauccugagagaugcgggauaucacgugaaagcuaauggcguggacgucaccacacaucggcaggauaucaacgggaaggagaugaaauuugaagugcugacccucgccucccugacgaccgagauucagaucaauauugaaaucgagucucgcaagagcuacaaaaagaugcuuaaggagaugggagaaguugccccugaguauagacacgacuccccggauuguggcaugauuauccugugcauugcugcccucgugaucacaaaacuggcugccggcgaccggagcgggcuuaccgcggucauccgcagagccaacaaugugcugaagaacgaaaugaaacgguacaagggacuccugcccaaagauauugcuaauucuuucuaugagguuuuugagaaguacccucauuucaucgacguguuuguccacuucggcauugcccaauccagcacacgcgggggaucuagaguggaaggcaucuuugcugggcuguucaugaacgccuacggagcgggccaggugaugcuccgguggggcguccuggccaaauccguuaagaauauuaugcuugggcacgcuagcgugcaggccgagauggaacagguggucgagguguaugaauacgcucaaaagcugggaggcgaggccggguuuuaucauauccucaacaaucccaaagccucucugcuuucccugacccaguucccucacuuuagcuccguugugcucggaaacgcugcgggccuggggaucaugggagaguaccgcggcacgcccagaaaccaggaccuguaugaugccgcuaaggccuacgccgaacagcucaaagagaauggcgucauuaacuauucugugcuggaccuuacagcugaggaacuggaagccaucaagcaucaacucaauccuaaagauaacgacguugagcugugaggacuagucccuguucccagagcccacuuuuuuuucuuuuuuugaaauaaaauagccugucuuucagaucuaaaaaaaaaaaaaaaaaaaaaaaaaaaaaaaaaaaaaaaaaaaaaaaaaaaaaaaaaaaaaaaaugcaucccccccccccccccccccccccccccccccaaaggcucuuuucagagccaccagaauu

SEQ ID NO: 20252 - RNA, 1498 nt, Artificial Sequence
  mRNA product Design a-4 comprising derived and/or modified sequence from HRSV(Memphis-37)__AIY60635.1__N (opt6)
gggagacuccugucgggcggaaguaggaggaguagaguuuaaaaacaguacucuuuuuccgguucgggacguaguugaagcaacgacaagccggauaaccgcucuugagacaggaagcuuaccauggccuuaaguaaaguaaaauuaaacgacacacuaaacaaagaccaauuacucucaucaucgaaauauacaauacaaagauccacaggagacuccauagauacaccaaauuacgacguacaaaaacauauaaacaaacucugcggaauguuauuaauaacagaagacgcaaaccacaaauucacaggagucauagguaugcuauacgcaaugucaagauuaggaagagaagauacaauaaaaauacuaagagacgcaggauaccacguaaaagcaaacggaguagacguaacaacacauagacaagauauaaacgguaaagaaaugaaauucgaaguacuaacacuagccagucuaacaacagaaauacaaauaaacauagaaauagaaagccgaaaaucauacaaaaaaauguuaaaagaaaugggggaaguagcacccgaauacagacaugauucaccugacugcggaaugauaauacucugcauagcggcauuagucauaacaaaacuagccgcaggagacagaagcggauuaacagcaguaauaagaagagcaaauaauguauuaaaaaaugaaaugaaaagguauaaaggauuacuaccaaaagauauagcaaacucauucuaugaaguuuucgaaaaauacccacacuucauagacgucuucguacacuuuggaauagcacaaagcagcacaagaggaggaagcagaguagaaggaauauucgcaggacuauucaugaaugcauacggagccggacaaguaaugcuaagauggggaguuuuagcaaaaagcguaaaaaacauaauguuaggacacgccuccguccaagccgaaauggaacaaguaguagaaguauacgaauaugcacaaaaacuaggaggagaagcaggauucuaucacauacucaauaacccaaaagcaucacuauugagcuuaacacaauucccacauuuuucauccguaguccuaggaaaugcagcaggcuuaggaauaaugggagaauacagaggcacaccaagaaaucaagacuuauacgaugcagcaaaagcauacgcagaacaacuaaaagaaaacggaguaauaaacuacucaguauuagauuuaacagcagaagaauuagaagcaauaaaacaucaacuaaauccuaaggauaaugauguagaacucuaaggacuagucccuguucccagagcccacuuuuuuuucuuuuuuugaaauaaaauagccugucuuucagaucuaaaaaaaaaaaaaaaaaaaaaaaaaaaaaaaaaaaaaaaaaaaaaaaaaaaaaaaaaaaaaaaaugcaucccccccccccccccccccccccccccccccaaaggcucuuuucagagccaccagaauu

SEQ ID NO: 20253 - RNA, 1498 nt, Artificial Sequence
  mRNA product Design a-4 comprising derived and/or modified sequence from HRSV(Memphis-37)__AIY60635.1__N (opt11)
gggagacuccugucgggcggaaguaggaggaguagaguuuaaaaacaguacucuuuuuccgguucgggacguaguugaagcaacgacaagccggauaaccgcucuugagacaggaagcuuaccauggcccuaagcaaagucaaacucaacgacacacuaaacaaagaccaacuccucagcuccagcaaauacaccauccaacgauccaccggcgacuccauagacacccccaacuacgacguccaaaaacacaucaacaaacuaugcggcaugcuccuaaucacagaagacgccaaccacaaauucaccggagucaucggcaugcucuacgccaugagccgccucggccgagaagacacaaucaaaauacuaagagacgccggcuaccacguaaaagccaacggcguagacguaaccacccaccgccaagacaucaacggcaaagaaaugaaauucgaaguucucacccucgccucacuaaccacggaaauccaaauaaacauugaaaucgaaagcagaaaauccuacaaaaagaugcuaaaagaaaugggcgagguagccccagaauaccgccacgacagccccgacugcggaaugaucauccucugcauugcagcccucgucaucaccaaacuagccgccggcgacagaagcggccuaaccgcaguaauccgccgagccaacaacguacucaaaaacgaaaugaaacgcuacaaaggccuccuccccaaagacaucgccaacagcuucuacgaaguauucgaaaaauacccgcacuucaucgacgucuucguacacuucggcauagcccaaagcagcacacgaggcggcucccgcgucgaaggaauauucgccggccuguucaugaacgcauacggagcgggccaagucaugcuccgcugggguguacuagccaaguccgucaaaaacaucaugcuagggcacgcaagcguacaagccgaaauggaacaaguagucgaagucuacgaauacgcacaaaaacuaggcggcgaagccggcuucuaccacauccuaaacaaccccaaagccucauuacucucccucacccaauuuccucacuucuccagcgucguccucggaaacgccgccggccuaggcauaaugggggaauaccgcggcaccccgcgcaaccaagaccucuacgacgcagcaaaagccuacgcagaacaacuaaaagaaaacggagucaucaacuacagcguacuggaccuaaccgccgaagaacucgaagccauaaaacaccaacucaaccccaaagacaacgacgucgagcucuaaggacuagucccuguucccagagcccacuuuuuuuucuuuuuuugaaauaaaauagccugucuuucagaucuaaaaaaaaaaaaaaaaaaaaaaaaaaaaaaaaaaaaaaaaaaaaaaaaaaaaaaaaaaaaaaaaugcaucccccccccccccccccccccccccccccccaaaggcucuuuucagagccaccagaauu

SEQ ID NO: 20254 - RNA, 1444 nt, Artificial Sequence
  mRNA product Design a-5 comprising derived and/or modified sequence from HRSV(Memphis-37)__AIY60635.1__N (wt)
gggagacuuucccauucuguagcagaauuugguguugccuguggucuuggucccgcggagaagcuuaccauggcucuuagcaaagucaaguugaacgauacacucaacaaagaucaacuucugucauccagcaaauacaccauccaacggagcacaggagauaguauugauacuccuaauuaugaugugcagaaacacaucaacaaguuauguggcauguuauuaaucacagaagaugcuaaucauaaauucacugggguaauagguauguuauaugcuaugucuagauuaggaagagaagacaccauaaaaauacucagagaugcgggauaucauguaaaagcaaauggaguggauguaacaacacaucgucaagacauuaauggaaaagaaaugaaauuugaaguguuaacauuggcaagcuuaacaacugaaauucaaaucaacauugagauagaaucuaggaaauccuacaaaaaaaugcuaaaagaaaugggagagguggcuccagaauacaggcaugacucuccugauuguggaaugauaauauuauguauagcagcauuaguaauaaccaaauuagcagcaggggauagaucuggucuuacugcugugauuaggagagcuaauaauguucuaaaaaaugaaaugaaacguuauaaaggcuuacuaccaaaggauauagccaacagcuucuaugaaguguuugaaaaauauccucacuuuauagauguuuuuguucauuuugguauagcacaaucuucuaccagagguggcaguagaguugaagggauuuuugcaggauuguuuaugaaugccuauggugcagggcaagugauguuacgguggggagucuuagcaaaaucaguuaaaaauauuaugcuaggacaugcuagugugcaagcagaaauggaacaaguuguggaaguuuaugaauaugcccaaaaauuggguggagaagcaggauucuaccauauauugaacaauccaaaagcaucauuauuaucuuugacucaauuuccccacuucuccaguguaguauugggcaaugcugcuggccuaggcauaaugggagaauacagagguacaccaaggaaucaagaucuauaugaugcugcaaaggcauaugcugaacaacucaaagaaaauggugugauuaacuacaguguauuagacuugacagcagaagaacuagaggcuaucaaacaucagcuuaauccaaaagauaaugauguagagcuuugaggacuagucccuguucccagagcccacuuuuuuuucuuuuuuugaaauaaaauagccugucuuucagaucuaaaaaaaaaaaaaaaaaaaaaaaaaaaaaaaaaaaaaaaaaaaaaaaaaaaaaaaaaaaaaaaaugcaucccccccccccccccccccccccccccccccaaaggcucuuuucagagccaccagaauu

SEQ ID NO: 20255 - RNA, 1444 nt, Artificial Sequence
  mRNA product Design a-5 comprising derived and/or modified sequence from HRSV(Memphis-37)__AIY60635.1__N (opt1)
gggagacuuucccauucuguagcagaauuugguguugccuguggucuuggucccgcggagaagcuuaccauggcccugagcaaggugaagcucaacgacacccugaacaaggaccagcugcucuccagcuccaaguacaccauccagcgcagcaccggcgacuccaucgacacccccaacuacgacguccagaagcacaucaacaagcugugcgggaugcugcucaucaccgaggacgccaaccacaaguucaccggcgugaucgggaugcuguacgcgaugagccggcugggccgcgaggacacgaucaagauccuccgggacgccggguaccacgugaaggccaacggcgucgacgugaccacccaccgccaggacaucaacggcaaggagaugaaguucgaggugcugacccuggccucccucacgaccgagauccagaucaacaucgagaucgagagccggaaguccuacaagaagaugcugaaggagaugggggaggucgccccggaguaccgccacgacagccccgacugcggcaugaucauccugugcaucgcggcccucgugaucaccaagcuggccgccggggaccgguccggccugaccgcggugauccgccgggccaacaacguccucaagaacgagaugaagcgcuacaaggggcugcugcccaaggacaucgccaacagcuucuacgagguguucgagaaguacccccacuucaucgacguguucguccacuucggcaucgcccaguccagcacgcggggcgggucccgcguggagggcaucuucgccgggcuguucaugaacgcguacggcgccggccaggugaugcugcgguggggcguccuggccaagagcgugaagaacaucaugcucgggcacgccuccgugcaggccgagauggagcaggucguggagguguacgaguacgcgcagaagcucgggggcgaggccggguucuaccacauccugaacaacccgaaggccagccuccugucccugacccaguucccccacuucagcagcgucgugcucggcaacgccgccggccuggggaucaugggcgaguaccgcgggacgccccggaaccaggaccuguacgacgcggccaaggccuacgccgagcagcucaaggagaacggcgugaucaacuacuccguccuggaccugaccgccgaggagcucgaggcgaucaagcaccagcugaaccccaaggacaacgacguggagcugugaggacuagucccuguucccagagcccacuuuuuuuucuuuuuuugaaauaaaauagccugucuuucagaucuaaaaaaaaaaaaaaaaaaaaaaaaaaaaaaaaaaaaaaaaaaaaaaaaaaaaaaaaaaaaaaaaugcaucccccccccccccccccccccccccccccccaaaggcucuuuucagagccaccagaauu

SEQ ID NO: 20256 - RNA, 1444 nt, Artificial Sequence
  mRNA product Design a-5 comprising derived and/or modified sequence from HRSV(Memphis-37)__AIY60635.1__N (opt2)
gggagacuuucccauucuguagcagaauuugguguugccuguggucuuggucccgcggagaagcuuaccauggcccucuccaaggucaagcucaacgacacccucaacaaggaccagcuccucuccuccuccaaguacaccauccagcgcuccaccggcgacuccaucgacacccccaacuacgacguccagaagcacaucaacaagcucugcggcaugcuccucaucaccgaggacgccaaccacaaguucaccggcgucaucggcaugcucuacgccaugucccgccucggccgcgaggacaccaucaagauccuccgcgacgccggcuaccacgucaaggccaacggcgucgacgucaccacccaccgccaggacaucaacggcaaggagaugaaguucgagguccucacccucgccucccucaccaccgagauccagaucaacaucgagaucgagucccgcaaguccuacaagaagaugcucaaggagaugggcgaggucgcccccgaguaccgccacgacucccccgacugcggcaugaucauccucugcaucgccgcccucgucaucaccaagcucgccgccggcgaccgcuccggccucaccgccgucauccgccgcgccaacaacguccucaagaacgagaugaagcgcuacaagggccuccuccccaaggacaucgccaacuccuucuacgaggucuucgagaaguacccccacuucaucgacgucuucguccacuucggcaucgcccaguccuccacccgcggcggcucccgcgucgagggcaucuucgccggccucuucaugaacgccuacggcgccggccaggucaugcuccgcuggggcguccucgccaaguccgucaagaacaucaugcucggccacgccuccguccaggccgagauggagcaggucgucgaggucuacgaguacgcccagaagcucggcggcgaggccggcuucuaccacauccucaacaaccccaaggccucccuccucucccucacccaguucccccacuucuccuccgucguccucggcaacgccgccggccucggcaucaugggcgaguaccgcggcaccccccgcaaccaggaccucuacgacgccgccaaggccuacgccgagcagcucaaggagaacggcgucaucaacuacuccguccucgaccucaccgccgaggagcucgaggccaucaagcaccagcucaaccccaaggacaacgacgucgagcucugaggacuagucccuguucccagagcccacuuuuuuuucuuuuuuugaaauaaaauagccugucuuucagaucuaaaaaaaaaaaaaaaaaaaaaaaaaaaaaaaaaaaaaaaaaaaaaaaaaaaaaaaaaaaaaaaaugcaucccccccccccccccccccccccccccccccaaaggcucuuuucagagccaccagaauu

SEQ ID NO: 20257 - RNA, 1444 nt, Artificial Sequence
  mRNA product Design a-5 comprising derived and/or modified sequence from HRSV(Memphis-37)__AIY60635.1__N (opt3)
gggagacuuucccauucuguagcagaauuugguguugccuguggucuuggucccgcggagaagcuuaccauggcccugagcaaggugaaacucaacgacacccuuaauaaggaucagcuguuguccucuucaaaauacacaauccaaagaaguacuggcgacagcauugauacgcccaacuaugacguccagaagcacauaaauaaauuaugcgggaugcugcuaaucaccgaggaugcuaaccauaaguucacaggaguuauugguaugcucuacgcaauguccaggcugggccgggaagacacuaucaagauucuucgcgaugccggguaucacgugaaagcgaauggaguagacgugaccacacaucgacaggauaucaacggcaaggagaugaaauuugaaguccugaccuuggcuucucucacuacagagauacagaucaauauugaaaucgagucgcguaagucauacaaaaagaugcugaaggagaugggugaaguggccccugaguauagacacgacagcccagauugugggaugauuauccugugcauagcagcccucguuauuaccaaauuagcugcaggagacaggaguggccugacggccgugauccggcgcgcuaacaauguccuuaagaacgaaaugaaaagauacaagggcuugcugccgaaagauauugccaauuccuucuaugagguguuugagaaguacccccauuucaucgacguauuuguucacuucgggaucgcgcaaucuagcacuaggggagguucccggguggaaggcauuuuugcagggcuauucaugaacgccuacggagcuggccaggucaugcuccgcuggggugugcuggccaaaucagugaagaauauaaugcuugggcacgcaaguguccaggcugagauggaacagguuguggagguauaugaauacgcccaaaagcugggaggcgaggcgggcuuuuaucauaucuugaacaauccuaaagccagccuccugucuuuaacccaguucccacacuuuuccucagugguccuggggaacgcagcuggacucgguauuaugggcgaguaccgagggacacccagaaaccaggaccuuuaugaugccgcuaaggccuacgcagaacagcugaaagagaauggagugaucaacuauagcguuuuggaccuaacugccgaggaacuggaagcuauaaagcaucaacucaauccuaaagauaacgacguggagcugugaggacuagucccuguucccagagcccacuuuuuuuucuuuuuuugaaauaaaauagccugucuuucagaucuaaaaaaaaaaaaaaaaaaaaaaaaaaaaaaaaaaaaaaaaaaaaaaaaaaaaaaaaaaaaaaaaugcaucccccccccccccccccccccccccccccccaaaggcucuuuucagagccaccagaauu

SEQ ID NO: 20258 - RNA, 1444 nt, Artificial Sequence
  mRNA product Design a-5 comprising derived and/or modified sequence from HRSV(Memphis-37)__AIY60635.1__N (opt4)
gggagacuuucccauucuguagcagaauuugguguugccuguggucuuggucccgcggagaagcuuaccauggcccugagcaaggugaagcugaacgacacccugaacaaggaccagcugcugagcagcagcaaguacaccauccagagaagcaccggcgacagcaucgacacccccaacuacgacgugcagaagcacaucaacaagcugugcggcaugcugcugaucaccgaggacgccaaccacaaguucaccggcgugaucggcaugcuguacgccaugagcagacugggcagagaggacaccaucaagauccugagagacgccggcuaccacgugaaggccaacggcguggacgugaccacccacagacaggacaucaacggcaaggagaugaaguucgaggugcugacccuggccagccugaccaccgagauccagaucaacaucgagaucgagagcagaaagagcuacaagaagaugcugaaggagaugggcgagguggcccccgaguacagacacgacagccccgacugcggcaugaucauccugugcaucgccgcccuggugaucaccaagcuggccgccggcgacagaagcggccugaccgccgugaucagaagagccaacaacgugcugaagaacgagaugaagagauacaagggccugcugcccaaggacaucgccaacagcuucuacgagguguucgagaaguacccccacuucaucgacguguucgugcacuucggcaucgcccagagcagcaccagaggcggcagcagaguggagggcaucuucgccggccuguucaugaacgccuacggcgccggccaggugaugcugagauggggcgugcuggccaagagcgugaagaacaucaugcugggccacgccagcgugcaggccgagauggagcaggugguggagguguacgaguacgcccagaagcugggcggcgaggccggcuucuaccacauccugaacaaccccaaggccagccugcugagccugacccaguucccccacuucagcagcguggugcugggcaacgccgccggccugggcaucaugggcgaguacagaggcacccccagaaaccaggaccuguacgacgccgccaaggccuacgccgagcagcugaaggagaacggcgugaucaacuacagcgugcuggaccugaccgccgaggagcuggaggccaucaagcaccagcugaaccccaaggacaacgacguggagcugugaggacuagucccuguucccagagcccacuuuuuuuucuuuuuuugaaauaaaauagccugucuuucagaucuaaaaaaaaaaaaaaaaaaaaaaaaaaaaaaaaaaaaaaaaaaaaaaaaaaaaaaaaaaaaaaaaugcaucccccccccccccccccccccccccccccccaaaggcucuuuucagagccaccagaauu

SEQ ID NO: 20259 - RNA, 1444 nt, Artificial Sequence
  mRNA product Design a-5 comprising derived and/or modified sequence from HRSV(Memphis-37)__AIY60635.1__N (opt5)
gggagacuuucccauucuguagcagaauuugguguugccuguggucuuggucccgcggagaagcuuaccauggcccugagcaaggugaaacucaacgacacccugaauaaggaucagcuucuguccucuagcaaauacacaauccaaagauccacgggcgacucuauugauacccccaacuaugacguccagaagcacaucaauaaacucugcgggaugcugcuuauuacagaggaugcuaaccauaaguucaccggaguuaucggcaugcuguacgccaugagccggcucgggcgcgaagacacaauuaagauccugagagaugcgggauaucacgugaaagcuaauggcguggacgucaccacacaucggcaggauaucaacgggaaggagaugaaauuugaagugcugacccucgccucccugacgaccgagauucagaucaauauugaaaucgagucucgcaagagcuacaaaaagaugcuuaaggagaugggagaaguugccccugaguauagacacgacuccccggauuguggcaugauuauccugugcauugcugcccucgugaucacaaaacuggcugccggcgaccggagcgggcuuaccgcggucauccgcagagccaacaaugugcugaagaacgaaaugaaacgguacaagggacuccugcccaaagauauugcuaauucuuucuaugagguuuuugagaaguacccucauuucaucgacguguuuguccacuucggcauugcccaauccagcacacgcgggggaucuagaguggaaggcaucuuugcugggcuguucaugaacgccuacggagcgggccaggugaugcuccgguggggcguccuggccaaauccguuaagaauauuaugcuugggcacgcuagcgugcaggccgagauggaacagguggucgagguguaugaauacgcucaaaagcugggaggcgaggccggguuuuaucauauccucaacaaucccaaagccucucugcuuucccugacccaguucccucacuuuagcuccguugugcucggaaacgcugcgggccuggggaucaugggagaguaccgcggcacgcccagaaaccaggaccuguaugaugccgcuaaggccuacgccgaacagcucaaagagaauggcgucauuaacuauucugugcuggaccuuacagcugaggaacuggaagccaucaagcaucaacucaauccuaaagauaacgacguugagcugugaggacuagucccuguucccagagcccacuuuuuuuucuuuuuuugaaauaaaauagccugucuuucagaucuaaaaaaaaaaaaaaaaaaaaaaaaaaaaaaaaaaaaaaaaaaaaaaaaaaaaaaaaaaaaaaaaugcaucccccccccccccccccccccccccccccccaaaggcucuuuucagagccaccagaauu

SEQ ID NO: 20260 - RNA, 1444 nt, Artificial Sequence
  mRNA product Design a-5 comprising derived and/or modified sequence from HRSV(Memphis-37)__AIY60635.1__N (opt6)
gggagacuuucccauucuguagcagaauuugguguugccuguggucuuggucccgcggagaagcuuaccauggccuuaaguaaaguaaaauuaaacgacacacuaaacaaagaccaauuacucucaucaucgaaauauacaauacaaagauccacaggagacuccauagauacaccaaauuacgacguacaaaaacauauaaacaaacucugcggaauguuauuaauaacagaagacgcaaaccacaaauucacaggagucauagguaugcuauacgcaaugucaagauuaggaagagaagauacaauaaaaauacuaagagacgcaggauaccacguaaaagcaaacggaguagacguaacaacacauagacaagauauaaacgguaaagaaaugaaauucgaaguacuaacacuagccagucuaacaacagaaauacaaauaaacauagaaauagaaagccgaaaaucauacaaaaaaauguuaaaagaaaugggggaaguagcacccgaauacagacaugauucaccugacugcggaaugauaauacucugcauagcggcauuagucauaacaaaacuagccgcaggagacagaagcggauuaacagcaguaauaagaagagcaaauaauguauuaaaaaaugaaaugaaaagguauaaaggauuacuaccaaaagauauagcaaacucauucuaugaaguuuucgaaaaauacccacacuucauagacgucuucguacacuuuggaauagcacaaagcagcacaagaggaggaagcagaguagaaggaauauucgcaggacuauucaugaaugcauacggagccggacaaguaaugcuaagauggggaguuuuagcaaaaagcguaaaaaacauaauguuaggacacgccuccguccaagccgaaauggaacaaguaguagaaguauacgaauaugcacaaaaacuaggaggagaagcaggauucuaucacauacucaauaacccaaaagcaucacuauugagcuuaacacaauucccacauuuuucauccguaguccuaggaaaugcagcaggcuuaggaauaaugggagaauacagaggcacaccaagaaaucaagacuuauacgaugcagcaaaagcauacgcagaacaacuaaaagaaaacggaguaauaaacuacucaguauuagauuuaacagcagaagaauuagaagcaauaaaacaucaacuaaauccuaaggauaaugauguagaacucuaaggacuagucccuguucccagagcccacuuuuuuuucuuuuuuugaaauaaaauagccugucuuucagaucuaaaaaaaaaaaaaaaaaaaaaaaaaaaaaaaaaaaaaaaaaaaaaaaaaaaaaaaaaaaaaaaaugcaucccccccccccccccccccccccccccccccaaaggcucuuuucagagccaccagaauu

SEQ ID NO: 20261 - RNA, 1444 nt, Artificial Sequence
  mRNA product Design a-5 comprising derived and/or modified sequence from HRSV(Memphis-37)__AIY60635.1__N (opt11)
gggagacuuucccauucuguagcagaauuugguguugccuguggucuuggucccgcggagaagcuuaccauggcccuaagcaaagucaaacucaacgacacacuaaacaaagaccaacuccucagcuccagcaaauacaccauccaacgauccaccggcgacuccauagacacccccaacuacgacguccaaaaacacaucaacaaacuaugcggcaugcuccuaaucacagaagacgccaaccacaaauucaccggagucaucggcaugcucuacgccaugagccgccucggccgagaagacacaaucaaaauacuaagagacgccggcuaccacguaaaagccaacggcguagacguaaccacccaccgccaagacaucaacggcaaagaaaugaaauucgaaguucucacccucgccucacuaaccacggaaauccaaauaaacauugaaaucgaaagcagaaaauccuacaaaaagaugcuaaaagaaaugggcgagguagccccagaauaccgccacgacagccccgacugcggaaugaucauccucugcauugcagcccucgucaucaccaaacuagccgccggcgacagaagcggccuaaccgcaguaauccgccgagccaacaacguacucaaaaacgaaaugaaacgcuacaaaggccuccuccccaaagacaucgccaacagcuucuacgaaguauucgaaaaauacccgcacuucaucgacgucuucguacacuucggcauagcccaaagcagcacacgaggcggcucccgcgucgaaggaauauucgccggccuguucaugaacgcauacggagcgggccaagucaugcuccgcugggguguacuagccaaguccgucaaaaacaucaugcuagggcacgcaagcguacaagccgaaauggaacaaguagucgaagucuacgaauacgcacaaaaacuaggcggcgaagccggcuucuaccacauccuaaacaaccccaaagccucauuacucucccucacccaauuuccucacuucuccagcgucguccucggaaacgccgccggccuaggcauaaugggggaauaccgcggcaccccgcgcaaccaagaccucuacgacgcagcaaaagccuacgcagaacaacuaaaagaaaacggagucaucaacuacagcguacuggaccuaaccgccgaagaacucgaagccauaaaacaccaacucaaccccaaagacaacgacgucgagcucuaaggacuagucccuguucccagagcccacuuuuuuuucuuuuuuugaaauaaaauagccugucuuucagaucuaaaaaaaaaaaaaaaaaaaaaaaaaaaaaaaaaaaaaaaaaaaaaaaaaaaaaaaaaaaaaaaaugcaucccccccccccccccccccccccccccccccaaaggcucuuuucagagccaccagaauu

SEQ ID NO: 20262 - RNA, 1625 nt, Artificial Sequence
  mRNA product Design b-1 comprising derived and/or modified sequence from HRSV(Memphis-37)__AIY60635.1__N (wt)
gggagacggagacggccugcaggaccugcucucucagcccucagccgaggccuacgccgagccgagugcgcagccgacgaccgggaggagccgcagccuucaacucugagguacugugauccgcgcugcccgccgggccgccccaguccgcugcugcggcaccuccuucccucgcgcccucuucgcucgccagcgccuucccugugagccugcgucaccgcggccgccaagcuuaccauggcucuuagcaaagucaaguugaacgauacacucaacaaagaucaacuucugucauccagcaaauacaccauccaacggagcacaggagauaguauugauacuccuaauuaugaugugcagaaacacaucaacaaguuauguggcauguuauuaaucacagaagaugcuaaucauaaauucacugggguaauagguauguuauaugcuaugucuagauuaggaagagaagacaccauaaaaauacucagagaugcgggauaucauguaaaagcaaauggaguggauguaacaacacaucgucaagacauuaauggaaaagaaaugaaauuugaaguguuaacauuggcaagcuuaacaacugaaauucaaaucaacauugagauagaaucuaggaaauccuacaaaaaaaugcuaaaagaaaugggagagguggcuccagaauacaggcaugacucuccugauuguggaaugauaauauuauguauagcagcauuaguaauaaccaaauuagcagcaggggauagaucuggucuuacugcugugauuaggagagcuaauaauguucuaaaaaaugaaaugaaacguuauaaaggcuuacuaccaaaggauauagccaacagcuucuaugaaguguuugaaaaauauccucacuuuauagauguuuuuguucauuuugguauagcacaaucuucuaccagagguggcaguagaguugaagggauuuuugcaggauuguuuaugaaugccuauggugcagggcaagugauguuacgguggggagucuuagcaaaaucaguuaaaaauauuaugcuaggacaugcuagugugcaagcagaaauggaacaaguuguggaaguuuaugaauaugcccaaaaauuggguggagaagcaggauucuaccauauauugaacaauccaaaagcaucauuauuaucuuugacucaauuuccccacuucuccaguguaguauugggcaaugcugcuggccuaggcauaaugggagaauacagagguacaccaaggaaucaagaucuauaugaugcugcaaaggcauaugcugaacaacucaaagaaaauggugugauuaacuacaguguauuagacuugacagcagaagaacuagaggcuaucaaacaucagcuuaauccaaaagauaaugauguagagcuuugaggacuaguguccaccugucccuccugggcugcuggauugucucguuuuccugccaaauaaacaggaucagcgcuuuacagaucuaaaaaaaaaaaaaaaaaaaaaaaaaaaaaaaaaaaaaaaaaaaaaaaaaaaaaaaaaaaaaaaaugcaucccccccccccccccccccccccccccccccaaaggcucuuuucagagccaccagaauu

SEQ ID NO: 20263 - RNA, 1625 nt, Artificial Sequence
  mRNA product Design b-1 comprising derived and/or modified sequence from HRSV(Memphis-37)__AIY60635.1__N (opt1)
gggagacggagacggccugcaggaccugcucucucagcccucagccgaggccuacgccgagccgagugcgcagccgacgaccgggaggagccgcagccuucaacucugagguacugugauccgcgcugcccgccgggccgccccaguccgcugcugcggcaccuccuucccucgcgcccucuucgcucgccagcgccuucccugugagccugcgucaccgcggccgccaagcuuaccauggcccugagcaaggugaagcucaacgacacccugaacaaggaccagcugcucuccagcuccaaguacaccauccagcgcagcaccggcgacuccaucgacacccccaacuacgacguccagaagcacaucaacaagcugugcgggaugcugcucaucaccgaggacgccaaccacaaguucaccggcgugaucgggaugcuguacgcgaugagccggcugggccgcgaggacacgaucaagauccuccgggacgccggguaccacgugaaggccaacggcgucgacgugaccacccaccgccaggacaucaacggcaaggagaugaaguucgaggugcugacccuggccucccucacgaccgagauccagaucaacaucgagaucgagagccggaaguccuacaagaagaugcugaaggagaugggggaggucgccccggaguaccgccacgacagccccgacugcggcaugaucauccugugcaucgcggcccucgugaucaccaagcuggccgccggggaccgguccggccugaccgcggugauccgccgggccaacaacguccucaagaacgagaugaagcgcuacaaggggcugcugcccaaggacaucgccaacagcuucuacgagguguucgagaaguacccccacuucaucgacguguucguccacuucggcaucgcccaguccagcacgcggggcgggucccgcguggagggcaucuucgccgggcuguucaugaacgcguacggcgccggccaggugaugcugcgguggggcguccuggccaagagcgugaagaacaucaugcucgggcacgccuccgugcaggccgagauggagcaggucguggagguguacgaguacgcgcagaagcucgggggcgaggccggguucuaccacauccugaacaacccgaaggccagccuccugucccugacccaguucccccacuucagcagcgucgugcucggcaacgccgccggccuggggaucaugggcgaguaccgcgggacgccccggaaccaggaccuguacgacgcggccaaggccuacgccgagcagcucaaggagaacggcgugaucaacuacuccguccuggaccugaccgccgaggagcucgaggcgaucaagcaccagcugaaccccaaggacaacgacguggagcugugaggacuaguguccaccugucccuccugggcugcuggauugucucguuuuccugccaaauaaacaggaucagcgcuuuacagaucuaaaaaaaaaaaaaaaaaaaaaaaaaaaaaaaaaaaaaaaaaaaaaaaaaaaaaaaaaaaaaaaaugcaucccccccccccccccccccccccccccccccaaaggcucuuuucagagccaccagaauu

SEQ ID NO: 20264 - RNA, 1625 nt, Artificial Sequence
  mRNA product Design b-1 comprising derived and/or modified sequence from HRSV(Memphis-37)__AIY60635.1__N (opt2)
gggagacggagacggccugcaggaccugcucucucagcccucagccgaggccuacgccgagccgagugcgcagccgacgaccgggaggagccgcagccuucaacucugagguacugugauccgcgcugcccgccgggccgccccaguccgcugcugcggcaccuccuucccucgcgcccucuucgcucgccagcgccuucccugugagccugcgucaccgcggccgccaagcuuaccauggcccucuccaaggucaagcucaacgacacccucaacaaggaccagcuccucuccuccuccaaguacaccauccagcgcuccaccggcgacuccaucgacacccccaacuacgacguccagaagcacaucaacaagcucugcggcaugcuccucaucaccgaggacgccaaccacaaguucaccggcgucaucggcaugcucuacgccaugucccgccucggccgcgaggacaccaucaagauccuccgcgacgccggcuaccacgucaaggccaacggcgucgacgucaccacccaccgccaggacaucaacggcaaggagaugaaguucgagguccucacccucgccucccucaccaccgagauccagaucaacaucgagaucgagucccgcaaguccuacaagaagaugcucaaggagaugggcgaggucgcccccgaguaccgccacgacucccccgacugcggcaugaucauccucugcaucgccgcccucgucaucaccaagcucgccgccggcgaccgcuccggccucaccgccgucauccgccgcgccaacaacguccucaagaacgagaugaagcgcuacaagggccuccuccccaaggacaucgccaacuccuucuacgaggucuucgagaaguacccccacuucaucgacgucuucguccacuucggcaucgcccaguccuccacccgcggcggcucccgcgucgagggcaucuucgccggccucuucaugaacgccuacggcgccggccaggucaugcuccgcuggggcguccucgccaaguccgucaagaacaucaugcucggccacgccuccguccaggccgagauggagcaggucgucgaggucuacgaguacgcccagaagcucggcggcgaggccggcuucuaccacauccucaacaaccccaaggccucccuccucucccucacccaguucccccacuucuccuccgucguccucggcaacgccgccggccucggcaucaugggcgaguaccgcggcaccccccgcaaccaggaccucuacgacgccgccaaggccuacgccgagcagcucaaggagaacggcgucaucaacuacuccguccucgaccucaccgccgaggagcucgaggccaucaagcaccagcucaaccccaaggacaacgacgucgagcucugaggacuaguguccaccugucccuccugggcugcuggauugucucguuuuccugccaaauaaacaggaucagcgcuuuacagaucuaaaaaaaaaaaaaaaaaaaaaaaaaaaaaaaaaaaaaaaaaaaaaaaaaaaaaaaaaaaaaaaaugcaucccccccccccccccccccccccccccccccaaaggcucuuuucagagccaccagaauu

SEQ ID NO: 20265 - RNA, 1625 nt, Artificial Sequence
  mRNA product Design b-1 comprising derived and/or modified sequence from HRSV(Memphis-37)__AIY60635.1__N (opt3)
gggagacggagacggccugcaggaccugcucucucagcccucagccgaggccuacgccgagccgagugcgcagccgacgaccgggaggagccgcagccuucaacucugagguacugugauccgcgcugcccgccgggccgccccaguccgcugcugcggcaccuccuucccucgcgcccucuucgcucgccagcgccuucccugugagccugcgucaccgcggccgccaagcuuaccauggcccugagcaaggugaaacucaacgacacccuuaauaaggaucagcuguuguccucuucaaaauacacaauccaaagaaguacuggcgacagcauugauacgcccaacuaugacguccagaagcacauaaauaaauuaugcgggaugcugcuaaucaccgaggaugcuaaccauaaguucacaggaguuauugguaugcucuacgcaauguccaggcugggccgggaagacacuaucaagauucuucgcgaugccggguaucacgugaaagcgaauggaguagacgugaccacacaucgacaggauaucaacggcaaggagaugaaauuugaaguccugaccuuggcuucucucacuacagagauacagaucaauauugaaaucgagucgcguaagucauacaaaaagaugcugaaggagaugggugaaguggccccugaguauagacacgacagcccagauugugggaugauuauccugugcauagcagcccucguuauuaccaaauuagcugcaggagacaggaguggccugacggccgugauccggcgcgcuaacaauguccuuaagaacgaaaugaaaagauacaagggcuugcugccgaaagauauugccaauuccuucuaugagguguuugagaaguacccccauuucaucgacguauuuguucacuucgggaucgcgcaaucuagcacuaggggagguucccggguggaaggcauuuuugcagggcuauucaugaacgccuacggagcuggccaggucaugcuccgcuggggugugcuggccaaaucagugaagaauauaaugcuugggcacgcaaguguccaggcugagauggaacagguuguggagguauaugaauacgcccaaaagcugggaggcgaggcgggcuuuuaucauaucuugaacaauccuaaagccagccuccugucuuuaacccaguucccacacuuuuccucagugguccuggggaacgcagcuggacucgguauuaugggcgaguaccgagggacacccagaaaccaggaccuuuaugaugccgcuaaggccuacgcagaacagcugaaagagaauggagugaucaacuauagcguuuuggaccuaacugccgaggaacuggaagcuauaaagcaucaacucaauccuaaagauaacgacguggagcugugaggacuaguguccaccugucccuccugggcugcuggauugucucguuuuccugccaaauaaacaggaucagcgcuuuacagaucuaaaaaaaaaaaaaaaaaaaaaaaaaaaaaaaaaaaaaaaaaaaaaaaaaaaaaaaaaaaaaaaaugcaucccccccccccccccccccccccccccccccaaaggcucuuuucagagccaccagaauu

SEQ ID NO: 20266 - RNA, 1625 nt, Artificial Sequence
  mRNA product Design b-1 comprising derived and/or modified sequence from HRSV(Memphis-37)__AIY60635.1__N (opt4)
gggagacggagacggccugcaggaccugcucucucagcccucagccgaggccuacgccgagccgagugcgcagccgacgaccgggaggagccgcagccuucaacucugagguacugugauccgcgcugcccgccgggccgccccaguccgcugcugcggcaccuccuucccucgcgcccucuucgcucgccagcgccuucccugugagccugcgucaccgcggccgccaagcuuaccauggcccugagcaaggugaagcugaacgacacccugaacaaggaccagcugcugagcagcagcaaguacaccauccagagaagcaccggcgacagcaucgacacccccaacuacgacgugcagaagcacaucaacaagcugugcggcaugcugcugaucaccgaggacgccaaccacaaguucaccggcgugaucggcaugcuguacgccaugagcagacugggcagagaggacaccaucaagauccugagagacgccggcuaccacgugaaggccaacggcguggacgugaccacccacagacaggacaucaacggcaaggagaugaaguucgaggugcugacccuggccagccugaccaccgagauccagaucaacaucgagaucgagagcagaaagagcuacaagaagaugcugaaggagaugggcgagguggcccccgaguacagacacgacagccccgacugcggcaugaucauccugugcaucgccgcccuggugaucaccaagcuggccgccggcgacagaagcggccugaccgccgugaucagaagagccaacaacgugcugaagaacgagaugaagagauacaagggccugcugcccaaggacaucgccaacagcuucuacgagguguucgagaaguacccccacuucaucgacguguucgugcacuucggcaucgcccagagcagcaccagaggcggcagcagaguggagggcaucuucgccggccuguucaugaacgccuacggcgccggccaggugaugcugagauggggcgugcuggccaagagcgugaagaacaucaugcugggccacgccagcgugcaggccgagauggagcaggugguggagguguacgaguacgcccagaagcugggcggcgaggccggcuucuaccacauccugaacaaccccaaggccagccugcugagccugacccaguucccccacuucagcagcguggugcugggcaacgccgccggccugggcaucaugggcgaguacagaggcacccccagaaaccaggaccuguacgacgccgccaaggccuacgccgagcagcugaaggagaacggcgugaucaacuacagcgugcuggaccugaccgccgaggagcuggaggccaucaagcaccagcugaaccccaaggacaacgacguggagcugugaggacuaguguccaccugucccuccugggcugcuggauugucucguuuuccugccaaauaaacaggaucagcgcuuuacagaucuaaaaaaaaaaaaaaaaaaaaaaaaaaaaaaaaaaaaaaaaaaaaaaaaaaaaaaaaaaaaaaaaugcaucccccccccccccccccccccccccccccccaaaggcucuuuucagagccaccagaauu

SEQ ID NO: 20267 - RNA, 1625 nt, Artificial Sequence
  mRNA product Design b-1 comprising derived and/or modified sequence from HRSV(Memphis-37)__AIY60635.1__N (opt5)
gggagacggagacggccugcaggaccugcucucucagcccucagccgaggccuacgccgagccgagugcgcagccgacgaccgggaggagccgcagccuucaacucugagguacugugauccgcgcugcccgccgggccgccccaguccgcugcugcggcaccuccuucccucgcgcccucuucgcucgccagcgccuucccugugagccugcgucaccgcggccgccaagcuuaccauggcccugagcaaggugaaacucaacgacacccugaauaaggaucagcuucuguccucuagcaaauacacaauccaaagauccacgggcgacucuauugauacccccaacuaugacguccagaagcacaucaauaaacucugcgggaugcugcuuauuacagaggaugcuaaccauaaguucaccggaguuaucggcaugcuguacgccaugagccggcucgggcgcgaagacacaauuaagauccugagagaugcgggauaucacgugaaagcuaauggcguggacgucaccacacaucggcaggauaucaacgggaaggagaugaaauuugaagugcugacccucgccucccugacgaccgagauucagaucaauauugaaaucgagucucgcaagagcuacaaaaagaugcuuaaggagaugggagaaguugccccugaguauagacacgacuccccggauuguggcaugauuauccugugcauugcugcccucgugaucacaaaacuggcugccggcgaccggagcgggcuuaccgcggucauccgcagagccaacaaugugcugaagaacgaaaugaaacgguacaagggacuccugcccaaagauauugcuaauucuuucuaugagguuuuugagaaguacccucauuucaucgacguguuuguccacuucggcauugcccaauccagcacacgcgggggaucuagaguggaaggcaucuuugcugggcuguucaugaacgccuacggagcgggccaggugaugcuccgguggggcguccuggccaaauccguuaagaauauuaugcuugggcacgcuagcgugcaggccgagauggaacagguggucgagguguaugaauacgcucaaaagcugggaggcgaggccggguuuuaucauauccucaacaaucccaaagccucucugcuuucccugacccaguucccucacuuuagcuccguugugcucggaaacgcugcgggccuggggaucaugggagaguaccgcggcacgcccagaaaccaggaccuguaugaugccgcuaaggccuacgccgaacagcucaaagagaauggcgucauuaacuauucugugcuggaccuuacagcugaggaacuggaagccaucaagcaucaacucaauccuaaagauaacgacguugagcugugaggacuaguguccaccugucccuccugggcugcuggauugucucguuuuccugccaaauaaacaggaucagcgcuuuacagaucuaaaaaaaaaaaaaaaaaaaaaaaaaaaaaaaaaaaaaaaaaaaaaaaaaaaaaaaaaaaaaaaaugcaucccccccccccccccccccccccccccccccaaaggcucuuuucagagccaccagaauu

SEQ ID NO: 20268 - RNA, 1625 nt, Artificial Sequence
  mRNA product Design b-1 comprising derived and/or modified sequence from HRSV(Memphis-37)__AIY60635.1__N (opt6)
gggagacggagacggccugcaggaccugcucucucagcccucagccgaggccuacgccgagccgagugcgcagccgacgaccgggaggagccgcagccuucaacucugagguacugugauccgcgcugcccgccgggccgccccaguccgcugcugcggcaccuccuucccucgcgcccucuucgcucgccagcgccuucccugugagccugcgucaccgcggccgccaagcuuaccauggccuuaaguaaaguaaaauuaaacgacacacuaaacaaagaccaauuacucucaucaucgaaauauacaauacaaagauccacaggagacuccauagauacaccaaauuacgacguacaaaaacauauaaacaaacucugcggaauguuauuaauaacagaagacgcaaaccacaaauucacaggagucauagguaugcuauacgcaaugucaagauuaggaagagaagauacaauaaaaauacuaagagacgcaggauaccacguaaaagcaaacggaguagacguaacaacacauagacaagauauaaacgguaaagaaaugaaauucgaaguacuaacacuagccagucuaacaacagaaauacaaauaaacauagaaauagaaagccgaaaaucauacaaaaaaauguuaaaagaaaugggggaaguagcacccgaauacagacaugauucaccugacugcggaaugauaauacucugcauagcggcauuagucauaacaaaacuagccgcaggagacagaagcggauuaacagcaguaauaagaagagcaaauaauguauuaaaaaaugaaaugaaaagguauaaaggauuacuaccaaaagauauagcaaacucauucuaugaaguuuucgaaaaauacccacacuucauagacgucuucguacacuuuggaauagcacaaagcagcacaagaggaggaagcagaguagaaggaauauucgcaggacuauucaugaaugcauacggagccggacaaguaaugcuaagauggggaguuuuagcaaaaagcguaaaaaacauaauguuaggacacgccuccguccaagccgaaauggaacaaguaguagaaguauacgaauaugcacaaaaacuaggaggagaagcaggauucuaucacauacucaauaacccaaaagcaucacuauugagcuuaacacaauucccacauuuuucauccguaguccuaggaaaugcagcaggcuuaggaauaaugggagaauacagaggcacaccaagaaaucaagacuuauacgaugcagcaaaagcauacgcagaacaacuaaaagaaaacggaguaauaaacuacucaguauuagauuuaacagcagaagaauuagaagcaauaaaacaucaacuaaauccuaaggauaaugauguagaacucuaaggacuaguguccaccugucccuccugggcugcuggauugucucguuuuccugccaaauaaacaggaucagcgcuuuacagaucuaaaaaaaaaaaaaaaaaaaaaaaaaaaaaaaaaaaaaaaaaaaaaaaaaaaaaaaaaaaaaaaaugcaucccccccccccccccccccccccccccccccaaaggcucuuuucagagccaccagaauu

SEQ ID NO: 20269 - RNA, 1625 nt, Artificial Sequence
  mRNA product Design b-1 comprising derived and/or modified sequence from HRSV(Memphis-37)__AIY60635.1__N (opt11)
gggagacggagacggccugcaggaccugcucucucagcccucagccgaggccuacgccgagccgagugcgcagccgacgaccgggaggagccgcagccuucaacucugagguacugugauccgcgcugcccgccgggccgccccaguccgcugcugcggcaccuccuucccucgcgcccucuucgcucgccagcgccuucccugugagccugcgucaccgcggccgccaagcuuaccauggcccuaagcaaagucaaacucaacgacacacuaaacaaagaccaacuccucagcuccagcaaauacaccauccaacgauccaccggcgacuccauagacacccccaacuacgacguccaaaaacacaucaacaaacuaugcggcaugcuccuaaucacagaagacgccaaccacaaauucaccggagucaucggcaugcucuacgccaugagccgccucggccgagaagacacaaucaaaauacuaagagacgccggcuaccacguaaaagccaacggcguagacguaaccacccaccgccaagacaucaacggcaaagaaaugaaauucgaaguucucacccucgccucacuaaccacggaaauccaaauaaacauugaaaucgaaagcagaaaauccuacaaaaagaugcuaaaagaaaugggcgagguagccccagaauaccgccacgacagccccgacugcggaaugaucauccucugcauugcagcccucgucaucaccaaacuagccgccggcgacagaagcggccuaaccgcaguaauccgccgagccaacaacguacucaaaaacgaaaugaaacgcuacaaaggccuccuccccaaagacaucgccaacagcuucuacgaaguauucgaaaaauacccgcacuucaucgacgucuucguacacuucggcauagcccaaagcagcacacgaggcggcucccgcgucgaaggaauauucgccggccuguucaugaacgcauacggagcgggccaagucaugcuccgcugggguguacuagccaaguccgucaaaaacaucaugcuagggcacgcaagcguacaagccgaaauggaacaaguagucgaagucuacgaauacgcacaaaaacuaggcggcgaagccggcuucuaccacauccuaaacaaccccaaagccucauuacucucccucacccaauuuccucacuucuccagcgucguccucggaaacgccgccggccuaggcauaaugggggaauaccgcggcaccccgcgcaaccaagaccucuacgacgcagcaaaagccuacgcagaacaacuaaaagaaaacggagucaucaacuacagcguacuggaccuaaccgccgaagaacucgaagccauaaaacaccaacucaaccccaaagacaacgacgucgagcucuaaggacuaguguccaccugucccuccugggcugcuggauugucucguuuuccugccaaauaaacaggaucagcgcuuuacagaucuaaaaaaaaaaaaaaaaaaaaaaaaaaaaaaaaaaaaaaaaaaaaaaaaaaaaaaaaaaaaaaaaugcaucccccccccccccccccccccccccccccccaaaggcucuuuucagagccaccagaauu

SEQ ID NO: 20270 - RNA, 1445 nt, Artificial Sequence
  mRNA product Design b-2 comprising derived and/or modified sequence from HRSV(Memphis-37)__AIY60635.1__N (wt)
gggagagccucugcuggaguccggggaguggcguuggcugcuagagcgaagcuuaccauggcucuuagcaaagucaaguugaacgauacacucaacaaagaucaacuucugucauccagcaaauacaccauccaacggagcacaggagauaguauugauacuccuaauuaugaugugcagaaacacaucaacaaguuauguggcauguuauuaaucacagaagaugcuaaucauaaauucacugggguaauagguauguuauaugcuaugucuagauuaggaagagaagacaccauaaaaauacucagagaugcgggauaucauguaaaagcaaauggaguggauguaacaacacaucgucaagacauuaauggaaaagaaaugaaauuugaaguguuaacauuggcaagcuuaacaacugaaauucaaaucaacauugagauagaaucuaggaaauccuacaaaaaaaugcuaaaagaaaugggagagguggcuccagaauacaggcaugacucuccugauuguggaaugauaauauuauguauagcagcauuaguaauaaccaaauuagcagcaggggauagaucuggucuuacugcugugauuaggagagcuaauaauguucuaaaaaaugaaaugaaacguuauaaaggcuuacuaccaaaggauauagccaacagcuucuaugaaguguuugaaaaauauccucacuuuauagauguuuuuguucauuuugguauagcacaaucuucuaccagagguggcaguagaguugaagggauuuuugcaggauuguuuaugaaugccuauggugcagggcaagugauguuacgguggggagucuuagcaaaaucaguuaaaaauauuaugcuaggacaugcuagugugcaagcagaaauggaacaaguuguggaaguuuaugaauaugcccaaaaauuggguggagaagcaggauucuaccauauauugaacaauccaaaagcaucauuauuaucuuugacucaauuuccccacuucuccaguguaguauugggcaaugcugcuggccuaggcauaaugggagaauacagagguacaccaaggaaucaagaucuauaugaugcugcaaaggcauaugcugaacaacucaaagaaaauggugugauuaacuacaguguauuagacuugacagcagaagaacuagaggcuaucaaacaucagcuuaauccaaaagauaaugauguagagcuuugaggacuaguguccaccugucccuccugggcugcuggauugucucguuuuccugccaaauaaacaggaucagcgcuuuacagaucuaaaaaaaaaaaaaaaaaaaaaaaaaaaaaaaaaaaaaaaaaaaaaaaaaaaaaaaaaaaaaaaaugcaucccccccccccccccccccccccccccccccaaaggcucuuuucagagccaccagaauu

SEQ ID NO: 20271 - RNA, 1445 nt, Artificial Sequence
  mRNA product Design b-2 comprising derived and/or modified sequence from HRSV(Memphis-37)__AIY60635.1__N (opt1)
gggagagccucugcuggaguccggggaguggcguuggcugcuagagcgaagcuuaccauggcccugagcaaggugaagcucaacgacacccugaacaaggaccagcugcucuccagcuccaaguacaccauccagcgcagcaccggcgacuccaucgacacccccaacuacgacguccagaagcacaucaacaagcugugcgggaugcugcucaucaccgaggacgccaaccacaaguucaccggcgugaucgggaugcuguacgcgaugagccggcugggccgcgaggacacgaucaagauccuccgggacgccggguaccacgugaaggccaacggcgucgacgugaccacccaccgccaggacaucaacggcaaggagaugaaguucgaggugcugacccuggccucccucacgaccgagauccagaucaacaucgagaucgagagccggaaguccuacaagaagaugcugaaggagaugggggaggucgccccggaguaccgccacgacagccccgacugcggcaugaucauccugugcaucgcggcccucgugaucaccaagcuggccgccggggaccgguccggccugaccgcggugauccgccgggccaacaacguccucaagaacgagaugaagcgcuacaaggggcugcugcccaaggacaucgccaacagcuucuacgagguguucgagaaguacccccacuucaucgacguguucguccacuucggcaucgcccaguccagcacgcggggcgggucccgcguggagggcaucuucgccgggcuguucaugaacgcguacggcgccggccaggugaugcugcgguggggcguccuggccaagagcgugaagaacaucaugcucgggcacgccuccgugcaggccgagauggagcaggucguggagguguacgaguacgcgcagaagcucgggggcgaggccggguucuaccacauccugaacaacccgaaggccagccuccugucccugacccaguucccccacuucagcagcgucgugcucggcaacgccgccggccuggggaucaugggcgaguaccgcgggacgccccggaaccaggaccuguacgacgcggccaaggccuacgccgagcagcucaaggagaacggcgugaucaacuacuccguccuggaccugaccgccgaggagcucgaggcgaucaagcaccagcugaaccccaaggacaacgacguggagcugugaggacuaguguccaccugucccuccugggcugcuggauugucucguuuuccugccaaauaaacaggaucagcgcuuuacagaucuaaaaaaaaaaaaaaaaaaaaaaaaaaaaaaaaaaaaaaaaaaaaaaaaaaaaaaaaaaaaaaaaugcaucccccccccccccccccccccccccccccccaaaggcucuuuucagagccaccagaauu

SEQ ID NO: 20272 - RNA, 1445 nt, Artificial Sequence
  mRNA product Design b-2 comprising derived and/or modified sequence from HRSV(Memphis-37)__AIY60635.1__N (opt2)
gggagagccucugcuggaguccggggaguggcguuggcugcuagagcgaagcuuaccauggcccucuccaaggucaagcucaacgacacccucaacaaggaccagcuccucuccuccuccaaguacaccauccagcgcuccaccggcgacuccaucgacacccccaacuacgacguccagaagcacaucaacaagcucugcggcaugcuccucaucaccgaggacgccaaccacaaguucaccggcgucaucggcaugcucuacgccaugucccgccucggccgcgaggacaccaucaagauccuccgcgacgccggcuaccacgucaaggccaacggcgucgacgucaccacccaccgccaggacaucaacggcaaggagaugaaguucgagguccucacccucgccucccucaccaccgagauccagaucaacaucgagaucgagucccgcaaguccuacaagaagaugcucaaggagaugggcgaggucgcccccgaguaccgccacgacucccccgacugcggcaugaucauccucugcaucgccgcccucgucaucaccaagcucgccgccggcgaccgcuccggccucaccgccgucauccgccgcgccaacaacguccucaagaacgagaugaagcgcuacaagggccuccuccccaaggacaucgccaacuccuucuacgaggucuucgagaaguacccccacuucaucgacgucuucguccacuucggcaucgcccaguccuccacccgcggcggcucccgcgucgagggcaucuucgccggccucuucaugaacgccuacggcgccggccaggucaugcuccgcuggggcguccucgccaaguccgucaagaacaucaugcucggccacgccuccguccaggccgagauggagcaggucgucgaggucuacgaguacgcccagaagcucggcggcgaggccggcuucuaccacauccucaacaaccccaaggccucccuccucucccucacccaguucccccacuucuccuccgucguccucggcaacgccgccggccucggcaucaugggcgaguaccgcggcaccccccgcaaccaggaccucuacgacgccgccaaggccuacgccgagcagcucaaggagaacggcgucaucaacuacuccguccucgaccucaccgccgaggagcucgaggccaucaagcaccagcucaaccccaaggacaacgacgucgagcucugaggacuaguguccaccugucccuccugggcugcuggauugucucguuuuccugccaaauaaacaggaucagcgcuuuacagaucuaaaaaaaaaaaaaaaaaaaaaaaaaaaaaaaaaaaaaaaaaaaaaaaaaaaaaaaaaaaaaaaaugcaucccccccccccccccccccccccccccccccaaaggcucuuuucagagccaccagaauu

SEQ ID NO: 20273 - RNA, 1445 nt, Artificial Sequence
  mRNA product Design b-2 comprising derived and/or modified sequence from HRSV(Memphis-37)__AIY60635.1__N (opt3)
gggagagccucugcuggaguccggggaguggcguuggcugcuagagcgaagcuuaccauggcccugagcaaggugaaacucaacgacacccuuaauaaggaucagcuguuguccucuucaaaauacacaauccaaagaaguacuggcgacagcauugauacgcccaacuaugacguccagaagcacauaaauaaauuaugcgggaugcugcuaaucaccgaggaugcuaaccauaaguucacaggaguuauugguaugcucuacgcaauguccaggcugggccgggaagacacuaucaagauucuucgcgaugccggguaucacgugaaagcgaauggaguagacgugaccacacaucgacaggauaucaacggcaaggagaugaaauuugaaguccugaccuuggcuucucucacuacagagauacagaucaauauugaaaucgagucgcguaagucauacaaaaagaugcugaaggagaugggugaaguggccccugaguauagacacgacagcccagauugugggaugauuauccugugcauagcagcccucguuauuaccaaauuagcugcaggagacaggaguggccugacggccgugauccggcgcgcuaacaauguccuuaagaacgaaaugaaaagauacaagggcuugcugccgaaagauauugccaauuccuucuaugagguguuugagaaguacccccauuucaucgacguauuuguucacuucgggaucgcgcaaucuagcacuaggggagguucccggguggaaggcauuuuugcagggcuauucaugaacgccuacggagcuggccaggucaugcuccgcuggggugugcuggccaaaucagugaagaauauaaugcuugggcacgcaaguguccaggcugagauggaacagguuguggagguauaugaauacgcccaaaagcugggaggcgaggcgggcuuuuaucauaucuugaacaauccuaaagccagccuccugucuuuaacccaguucccacacuuuuccucagugguccuggggaacgcagcuggacucgguauuaugggcgaguaccgagggacacccagaaaccaggaccuuuaugaugccgcuaaggccuacgcagaacagcugaaagagaauggagugaucaacuauagcguuuuggaccuaacugccgaggaacuggaagcuauaaagcaucaacucaauccuaaagauaacgacguggagcugugaggacuaguguccaccugucccuccugggcugcuggauugucucguuuuccugccaaauaaacaggaucagcgcuuuacagaucuaaaaaaaaaaaaaaaaaaaaaaaaaaaaaaaaaaaaaaaaaaaaaaaaaaaaaaaaaaaaaaaaugcaucccccccccccccccccccccccccccccccaaaggcucuuuucagagccaccagaauu

SEQ ID NO: 20274 - RNA, 1445 nt, Artificial Sequence
  mRNA product Design b-2 comprising derived and/or modified sequence from HRSV(Memphis-37)__AIY60635.1__N (opt4)
gggagagccucugcuggaguccggggaguggcguuggcugcuagagcgaagcuuaccauggcccugagcaaggugaagcugaacgacacccugaacaaggaccagcugcugagcagcagcaaguacaccauccagagaagcaccggcgacagcaucgacacccccaacuacgacgugcagaagcacaucaacaagcugugcggcaugcugcugaucaccgaggacgccaaccacaaguucaccggcgugaucggcaugcuguacgccaugagcagacugggcagagaggacaccaucaagauccugagagacgccggcuaccacgugaaggccaacggcguggacgugaccacccacagacaggacaucaacggcaaggagaugaaguucgaggugcugacccuggccagccugaccaccgagauccagaucaacaucgagaucgagagcagaaagagcuacaagaagaugcugaaggagaugggcgagguggcccccgaguacagacacgacagccccgacugcggcaugaucauccugugcaucgccgcccuggugaucaccaagcuggccgccggcgacagaagcggccugaccgccgugaucagaagagccaacaacgugcugaagaacgagaugaagagauacaagggccugcugcccaaggacaucgccaacagcuucuacgagguguucgagaaguacccccacuucaucgacguguucgugcacuucggcaucgcccagagcagcaccagaggcggcagcagaguggagggcaucuucgccggccuguucaugaacgccuacggcgccggccaggugaugcugagauggggcgugcuggccaagagcgugaagaacaucaugcugggccacgccagcgugcaggccgagauggagcaggugguggagguguacgaguacgcccagaagcugggcggcgaggccggcuucuaccacauccugaacaaccccaaggccagccugcugagccugacccaguucccccacuucagcagcguggugcugggcaacgccgccggccugggcaucaugggcgaguacagaggcacccccagaaaccaggaccuguacgacgccgccaaggccuacgccgagcagcugaaggagaacggcgugaucaacuacagcgugcuggaccugaccgccgaggagcuggaggccaucaagcaccagcugaaccccaaggacaacgacguggagcugugaggacuaguguccaccugucccuccugggcugcuggauugucucguuuuccugccaaauaaacaggaucagcgcuuuacagaucuaaaaaaaaaaaaaaaaaaaaaaaaaaaaaaaaaaaaaaaaaaaaaaaaaaaaaaaaaaaaaaaaugcaucccccccccccccccccccccccccccccccaaaggcucuuuucagagccaccagaauu

SEQ ID NO: 20275 - RNA, 1445 nt, Artificial Sequence
  mRNA product Design b-2 comprising derived and/or modified sequence from HRSV(Memphis-37)__AIY60635.1__N (opt5)
gggagagccucugcuggaguccggggaguggcguuggcugcuagagcgaagcuuaccauggcccugagcaaggugaaacucaacgacacccugaauaaggaucagcuucuguccucuagcaaauacacaauccaaagauccacgggcgacucuauugauacccccaacuaugacguccagaagcacaucaauaaacucugcgggaugcugcuuauuacagaggaugcuaaccauaaguucaccggaguuaucggcaugcuguacgccaugagccggcucgggcgcgaagacacaauuaagauccugagagaugcgggauaucacgugaaagcuaauggcguggacgucaccacacaucggcaggauaucaacgggaaggagaugaaauuugaagugcugacccucgccucccugacgaccgagauucagaucaauauugaaaucgagucucgcaagagcuacaaaaagaugcuuaaggagaugggagaaguugccccugaguauagacacgacuccccggauuguggcaugauuauccugugcauugcugcccucgugaucacaaaacuggcugccggcgaccggagcgggcuuaccgcggucauccgcagagccaacaaugugcugaagaacgaaaugaaacgguacaagggacuccugcccaaagauauugcuaauucuuucuaugagguuuuugagaaguacccucauuucaucgacguguuuguccacuucggcauugcccaauccagcacacgcgggggaucuagaguggaaggcaucuuugcugggcuguucaugaacgccuacggagcgggccaggugaugcuccgguggggcguccuggccaaauccguuaagaauauuaugcuugggcacgcuagcgugcaggccgagauggaacagguggucgagguguaugaauacgcucaaaagcugggaggcgaggccggguuuuaucauauccucaacaaucccaaagccucucugcuuucccugacccaguucccucacuuuagcuccguugugcucggaaacgcugcgggccuggggaucaugggagaguaccgcggcacgcccagaaaccaggaccuguaugaugccgcuaaggccuacgccgaacagcucaaagagaauggcgucauuaacuauucugugcuggaccuuacagcugaggaacuggaagccaucaagcaucaacucaauccuaaagauaacgacguugagcugugaggacuaguguccaccugucccuccugggcugcuggauugucucguuuuccugccaaauaaacaggaucagcgcuuuacagaucuaaaaaaaaaaaaaaaaaaaaaaaaaaaaaaaaaaaaaaaaaaaaaaaaaaaaaaaaaaaaaaaaugcaucccccccccccccccccccccccccccccccaaaggcucuuuucagagccaccagaauu

SEQ ID NO: 20276 - RNA, 1445 nt, Artificial Sequence
  mRNA product Design b-2 comprising derived and/or modified sequence from HRSV(Memphis-37)__AIY60635.1__N (opt6)
gggagagccucugcuggaguccggggaguggcguuggcugcuagagcgaagcuuaccauggccuuaaguaaaguaaaauuaaacgacacacuaaacaaagaccaauuacucucaucaucgaaauauacaauacaaagauccacaggagacuccauagauacaccaaauuacgacguacaaaaacauauaaacaaacucugcggaauguuauuaauaacagaagacgcaaaccacaaauucacaggagucauagguaugcuauacgcaaugucaagauuaggaagagaagauacaauaaaaauacuaagagacgcaggauaccacguaaaagcaaacggaguagacguaacaacacauagacaagauauaaacgguaaagaaaugaaauucgaaguacuaacacuagccagucuaacaacagaaauacaaauaaacauagaaauagaaagccgaaaaucauacaaaaaaauguuaaaagaaaugggggaaguagcacccgaauacagacaugauucaccugacugcggaaugauaauacucugcauagcggcauuagucauaacaaaacuagccgcaggagacagaagcggauuaacagcaguaauaagaagagcaaauaauguauuaaaaaaugaaaugaaaagguauaaaggauuacuaccaaaagauauagcaaacucauucuaugaaguuuucgaaaaauacccacacuucauagacgucuucguacacuuuggaauagcacaaagcagcacaagaggaggaagcagaguagaaggaauauucgcaggacuauucaugaaugcauacggagccggacaaguaaugcuaagauggggaguuuuagcaaaaagcguaaaaaacauaauguuaggacacgccuccguccaagccgaaauggaacaaguaguagaaguauacgaauaugcacaaaaacuaggaggagaagcaggauucuaucacauacucaauaacccaaaagcaucacuauugagcuuaacacaauucccacauuuuucauccguaguccuaggaaaugcagcaggcuuaggaauaaugggagaauacagaggcacaccaagaaaucaagacuuauacgaugcagcaaaagcauacgcagaacaacuaaaagaaaacggaguaauaaacuacucaguauuagauuuaacagcagaagaauuagaagcaauaaaacaucaacuaaauccuaaggauaaugauguagaacucuaaggacuaguguccaccugucccuccugggcugcuggauugucucguuuuccugccaaauaaacaggaucagcgcuuuacagaucuaaaaaaaaaaaaaaaaaaaaaaaaaaaaaaaaaaaaaaaaaaaaaaaaaaaaaaaaaaaaaaaaugcaucccccccccccccccccccccccccccccccaaaggcucuuuucagagccaccagaauu

SEQ ID NO: 20277 - RNA, 1445 nt, Artificial Sequence
  mRNA product Design b-2 comprising derived and/or modified sequence from HRSV(Memphis-37)__AIY60635.1__N (opt11)
gggagagccucugcuggaguccggggaguggcguuggcugcuagagcgaagcuuaccauggcccuaagcaaagucaaacucaacgacacacuaaacaaagaccaacuccucagcuccagcaaauacaccauccaacgauccaccggcgacuccauagacacccccaacuacgacguccaaaaacacaucaacaaacuaugcggcaugcuccuaaucacagaagacgccaaccacaaauucaccggagucaucggcaugcucuacgccaugagccgccucggccgagaagacacaaucaaaauacuaagagacgccggcuaccacguaaaagccaacggcguagacguaaccacccaccgccaagacaucaacggcaaagaaaugaaauucgaaguucucacccucgccucacuaaccacggaaauccaaauaaacauugaaaucgaaagcagaaaauccuacaaaaagaugcuaaaagaaaugggcgagguagccccagaauaccgccacgacagccccgacugcggaaugaucauccucugcauugcagcccucgucaucaccaaacuagccgccggcgacagaagcggccuaaccgcaguaauccgccgagccaacaacguacucaaaaacgaaaugaaacgcuacaaaggccuccuccccaaagacaucgccaacagcuucuacgaaguauucgaaaaauacccgcacuucaucgacgucuucguacacuucggcauagcccaaagcagcacacgaggcggcucccgcgucgaaggaauauucgccggccuguucaugaacgcauacggagcgggccaagucaugcuccgcugggguguacuagccaaguccgucaaaaacaucaugcuagggcacgcaagcguacaagccgaaauggaacaaguagucgaagucuacgaauacgcacaaaaacuaggcggcgaagccggcuucuaccacauccuaaacaaccccaaagccucauuacucucccucacccaauuuccucacuucuccagcgucguccucggaaacgccgccggccuaggcauaaugggggaauaccgcggcaccccgcgcaaccaagaccucuacgacgcagcaaaagccuacgcagaacaacuaaaagaaaacggagucaucaacuacagcguacuggaccuaaccgccgaagaacucgaagccauaaaacaccaacucaaccccaaagacaacgacgucgagcucuaaggacuaguguccaccugucccuccugggcugcuggauugucucguuuuccugccaaauaaacaggaucagcgcuuuacagaucuaaaaaaaaaaaaaaaaaaaaaaaaaaaaaaaaaaaaaaaaaaaaaaaaaaaaaaaaaaaaaaaaugcaucccccccccccccccccccccccccccccccaaaggcucuuuucagagccaccagaauu

SEQ ID NO: 20278 - RNA, 1465 nt, Artificial Sequence
  mRNA product Design b-3 comprising derived and/or modified sequence from HRSV(Memphis-37)__AIY60635.1__N (wt)
gggagagucccgcagucggcguccagcggcucugcuuguucgugugugugucguugcaggccuuauucaagcuuaccauggcucuuagcaaagucaaguugaacgauacacucaacaaagaucaacuucugucauccagcaaauacaccauccaacggagcacaggagauaguauugauacuccuaauuaugaugugcagaaacacaucaacaaguuauguggcauguuauuaaucacagaagaugcuaaucauaaauucacugggguaauagguauguuauaugcuaugucuagauuaggaagagaagacaccauaaaaauacucagagaugcgggauaucauguaaaagcaaauggaguggauguaacaacacaucgucaagacauuaauggaaaagaaaugaaauuugaaguguuaacauuggcaagcuuaacaacugaaauucaaaucaacauugagauagaaucuaggaaauccuacaaaaaaaugcuaaaagaaaugggagagguggcuccagaauacaggcaugacucuccugauuguggaaugauaauauuauguauagcagcauuaguaauaaccaaauuagcagcaggggauagaucuggucuuacugcugugauuaggagagcuaauaauguucuaaaaaaugaaaugaaacguuauaaaggcuuacuaccaaaggauauagccaacagcuucuaugaaguguuugaaaaauauccucacuuuauagauguuuuuguucauuuugguauagcacaaucuucuaccagagguggcaguagaguugaagggauuuuugcaggauuguuuaugaaugccuauggugcagggcaagugauguuacgguggggagucuuagcaaaaucaguuaaaaauauuaugcuaggacaugcuagugugcaagcagaaauggaacaaguuguggaaguuuaugaauaugcccaaaaauuggguggagaagcaggauucuaccauauauugaacaauccaaaagcaucauuauuaucuuugacucaauuuccccacuucuccaguguaguauugggcaaugcugcuggccuaggcauaaugggagaauacagagguacaccaaggaaucaagaucuauaugaugcugcaaaggcauaugcugaacaacucaaagaaaauggugugauuaacuacaguguauuagacuugacagcagaagaacuagaggcuaucaaacaucagcuuaauccaaaagauaaugauguagagcuuugaggacuaguguccaccugucccuccugggcugcuggauugucucguuuuccugccaaauaaacaggaucagcgcuuuacagaucuaaaaaaaaaaaaaaaaaaaaaaaaaaaaaaaaaaaaaaaaaaaaaaaaaaaaaaaaaaaaaaaaugcaucccccccccccccccccccccccccccccccaaaggcucuuuucagagccaccagaauu

SEQ ID NO: 20279 - RNA, 1465 nt, Artificial Sequence
  mRNA product Design b-3 comprising derived and/or modified sequence from HRSV(Memphis-37)__AIY60635.1__N (opt1)
gggagagucccgcagucggcguccagcggcucugcuuguucgugugugugucguugcaggccuuauucaagcuuaccauggcccugagcaaggugaagcucaacgacacccugaacaaggaccagcugcucuccagcuccaaguacaccauccagcgcagcaccggcgacuccaucgacacccccaacuacgacguccagaagcacaucaacaagcugugcgggaugcugcucaucaccgaggacgccaaccacaaguucaccggcgugaucgggaugcuguacgcgaugagccggcugggccgcgaggacacgaucaagauccuccgggacgccggguaccacgugaaggccaacggcgucgacgugaccacccaccgccaggacaucaacggcaaggagaugaaguucgaggugcugacccuggccucccucacgaccgagauccagaucaacaucgagaucgagagccggaaguccuacaagaagaugcugaaggagaugggggaggucgccccggaguaccgccacgacagccccgacugcggcaugaucauccugugcaucgcggcccucgugaucaccaagcuggccgccggggaccgguccggccugaccgcggugauccgccgggccaacaacguccucaagaacgagaugaagcgcuacaaggggcugcugcccaaggacaucgccaacagcuucuacgagguguucgagaaguacccccacuucaucgacguguucguccacuucggcaucgcccaguccagcacgcggggcgggucccgcguggagggcaucuucgccgggcuguucaugaacgcguacggcgccggccaggugaugcugcgguggggcguccuggccaagagcgugaagaacaucaugcucgggcacgccuccgugcaggccgagauggagcaggucguggagguguacgaguacgcgcagaagcucgggggcgaggccggguucuaccacauccugaacaacccgaaggccagccuccugucccugacccaguucccccacuucagcagcgucgugcucggcaacgccgccggccuggggaucaugggcgaguaccgcgggacgccccggaaccaggaccuguacgacgcggccaaggccuacgccgagcagcucaaggagaacggcgugaucaacuacuccguccuggaccugaccgccgaggagcucgaggcgaucaagcaccagcugaaccccaaggacaacgacguggagcugugaggacuaguguccaccugucccuccugggcugcuggauugucucguuuuccugccaaauaaacaggaucagcgcuuuacagaucuaaaaaaaaaaaaaaaaaaaaaaaaaaaaaaaaaaaaaaaaaaaaaaaaaaaaaaaaaaaaaaaaugcaucccccccccccccccccccccccccccccccaaaggcucuuuucagagccaccagaauu

SEQ ID NO: 20280 - RNA, 1465 nt, Artificial Sequence
  mRNA product Design b-3 comprising derived and/or modified sequence from HRSV(Memphis-37)__AIY60635.1__N (opt2)
gggagagucccgcagucggcguccagcggcucugcuuguucgugugugugucguugcaggccuuauucaagcuuaccauggcccucuccaaggucaagcucaacgacacccucaacaaggaccagcuccucuccuccuccaaguacaccauccagcgcuccaccggcgacuccaucgacacccccaacuacgacguccagaagcacaucaacaagcucugcggcaugcuccucaucaccgaggacgccaaccacaaguucaccggcgucaucggcaugcucuacgccaugucccgccucggccgcgaggacaccaucaagauccuccgcgacgccggcuaccacgucaaggccaacggcgucgacgucaccacccaccgccaggacaucaacggcaaggagaugaaguucgagguccucacccucgccucccucaccaccgagauccagaucaacaucgagaucgagucccgcaaguccuacaagaagaugcucaaggagaugggcgaggucgcccccgaguaccgccacgacucccccgacugcggcaugaucauccucugcaucgccgcccucgucaucaccaagcucgccgccggcgaccgcuccggccucaccgccgucauccgccgcgccaacaacguccucaagaacgagaugaagcgcuacaagggccuccuccccaaggacaucgccaacuccuucuacgaggucuucgagaaguacccccacuucaucgacgucuucguccacuucggcaucgcccaguccuccacccgcggcggcucccgcgucgagggcaucuucgccggccucuucaugaacgccuacggcgccggccaggucaugcuccgcuggggcguccucgccaaguccgucaagaacaucaugcucggccacgccuccguccaggccgagauggagcaggucgucgaggucuacgaguacgcccagaagcucggcggcgaggccggcuucuaccacauccucaacaaccccaaggccucccuccucucccucacccaguucccccacuucuccuccgucguccucggcaacgccgccggccucggcaucaugggcgaguaccgcggcaccccccgcaaccaggaccucuacgacgccgccaaggccuacgccgagcagcucaaggagaacggcgucaucaacuacuccguccucgaccucaccgccgaggagcucgaggccaucaagcaccagcucaaccccaaggacaacgacgucgagcucugaggacuaguguccaccugucccuccugggcugcuggauugucucguuuuccugccaaauaaacaggaucagcgcuuuacagaucuaaaaaaaaaaaaaaaaaaaaaaaaaaaaaaaaaaaaaaaaaaaaaaaaaaaaaaaaaaaaaaaaugcaucccccccccccccccccccccccccccccccaaaggcucuuuucagagccaccagaauu

SEQ ID NO: 20281 - RNA, 1465 nt, Artificial Sequence
  mRNA product Design b-3 comprising derived and/or modified sequence from HRSV(Memphis-37)__AIY60635.1__N (opt3)
gggagagucccgcagucggcguccagcggcucugcuuguucgugugugugucguugcaggccuuauucaagcuuaccauggcccugagcaaggugaaacucaacgacacccuuaauaaggaucagcuguuguccucuucaaaauacacaauccaaagaaguacuggcgacagcauugauacgcccaacuaugacguccagaagcacauaaauaaauuaugcgggaugcugcuaaucaccgaggaugcuaaccauaaguucacaggaguuauugguaugcucuacgcaauguccaggcugggccgggaagacacuaucaagauucuucgcgaugccggguaucacgugaaagcgaauggaguagacgugaccacacaucgacaggauaucaacggcaaggagaugaaauuugaaguccugaccuuggcuucucucacuacagagauacagaucaauauugaaaucgagucgcguaagucauacaaaaagaugcugaaggagaugggugaaguggccccugaguauagacacgacagcccagauugugggaugauuauccugugcauagcagcccucguuauuaccaaauuagcugcaggagacaggaguggccugacggccgugauccggcgcgcuaacaauguccuuaagaacgaaaugaaaagauacaagggcuugcugccgaaagauauugccaauuccuucuaugagguguuugagaaguacccccauuucaucgacguauuuguucacuucgggaucgcgcaaucuagcacuaggggagguucccggguggaaggcauuuuugcagggcuauucaugaacgccuacggagcuggccaggucaugcuccgcuggggugugcuggccaaaucagugaagaauauaaugcuugggcacgcaaguguccaggcugagauggaacagguuguggagguauaugaauacgcccaaaagcugggaggcgaggcgggcuuuuaucauaucuugaacaauccuaaagccagccuccugucuuuaacccaguucccacacuuuuccucagugguccuggggaacgcagcuggacucgguauuaugggcgaguaccgagggacacccagaaaccaggaccuuuaugaugccgcuaaggccuacgcagaacagcugaaagagaauggagugaucaacuauagcguuuuggaccuaacugccgaggaacuggaagcuauaaagcaucaacucaauccuaaagauaacgacguggagcugugaggacuaguguccaccugucccuccugggcugcuggauugucucguuuuccugccaaauaaacaggaucagcgcuuuacagaucuaaaaaaaaaaaaaaaaaaaaaaaaaaaaaaaaaaaaaaaaaaaaaaaaaaaaaaaaaaaaaaaaugcaucccccccccccccccccccccccccccccccaaaggcucuuuucagagccaccagaauu

SEQ ID NO: 20282 - RNA, 1465 nt, Artificial Sequence
  mRNA product Design b-3 comprising derived and/or modified sequence from HRSV(Memphis-37)__AIY60635.1__N (opt4)
gggagagucccgcagucggcguccagcggcucugcuuguucgugugugugucguugcaggccuuauucaagcuuaccauggcccugagcaaggugaagcugaacgacacccugaacaaggaccagcugcugagcagcagcaaguacaccauccagagaagcaccggcgacagcaucgacacccccaacuacgacgugcagaagcacaucaacaagcugugcggcaugcugcugaucaccgaggacgccaaccacaaguucaccggcgugaucggcaugcuguacgccaugagcagacugggcagagaggacaccaucaagauccugagagacgccggcuaccacgugaaggccaacggcguggacgugaccacccacagacaggacaucaacggcaaggagaugaaguucgaggugcugacccuggccagccugaccaccgagauccagaucaacaucgagaucgagagcagaaagagcuacaagaagaugcugaaggagaugggcgagguggcccccgaguacagacacgacagccccgacugcggcaugaucauccugugcaucgccgcccuggugaucaccaagcuggccgccggcgacagaagcggccugaccgccgugaucagaagagccaacaacgugcugaagaacgagaugaagagauacaagggccugcugcccaaggacaucgccaacagcuucuacgagguguucgagaaguacccccacuucaucgacguguucgugcacuucggcaucgcccagagcagcaccagaggcggcagcagaguggagggcaucuucgccggccuguucaugaacgccuacggcgccggccaggugaugcugagauggggcgugcuggccaagagcgugaagaacaucaugcugggccacgccagcgugcaggccgagauggagcaggugguggagguguacgaguacgcccagaagcugggcggcgaggccggcuucuaccacauccugaacaaccccaaggccagccugcugagccugacccaguucccccacuucagcagcguggugcugggcaacgccgccggccugggcaucaugggcgaguacagaggcacccccagaaaccaggaccuguacgacgccgccaaggccuacgccgagcagcugaaggagaacggcgugaucaacuacagcgugcuggaccugaccgccgaggagcuggaggccaucaagcaccagcugaaccccaaggacaacgacguggagcugugaggacuaguguccaccugucccuccugggcugcuggauugucucguuuuccugccaaauaaacaggaucagcgcuuuacagaucuaaaaaaaaaaaaaaaaaaaaaaaaaaaaaaaaaaaaaaaaaaaaaaaaaaaaaaaaaaaaaaaaugcaucccccccccccccccccccccccccccccccaaaggcucuuuucagagccaccagaauu

SEQ ID NO: 20283 - RNA, 1465 nt, Artificial Sequence
  mRNA product Design b-3 comprising derived and/or modified sequence from HRSV(Memphis-37)__AIY60635.1__N (opt5)
gggagagucccgcagucggcguccagcggcucugcuuguucgugugugugucguugcaggccuuauucaagcuuaccauggcccugagcaaggugaaacucaacgacacccugaauaaggaucagcuucuguccucuagcaaauacacaauccaaagauccacgggcgacucuauugauacccccaacuaugacguccagaagcacaucaauaaacucugcgggaugcugcuuauuacagaggaugcuaaccauaaguucaccggaguuaucggcaugcuguacgccaugagccggcucgggcgcgaagacacaauuaagauccugagagaugcgggauaucacgugaaagcuaauggcguggacgucaccacacaucggcaggauaucaacgggaaggagaugaaauuugaagugcugacccucgccucccugacgaccgagauucagaucaauauugaaaucgagucucgcaagagcuacaaaaagaugcuuaaggagaugggagaaguugccccugaguauagacacgacuccccggauuguggcaugauuauccugugcauugcugcccucgugaucacaaaacuggcugccggcgaccggagcgggcuuaccgcggucauccgcagagccaacaaugugcugaagaacgaaaugaaacgguacaagggacuccugcccaaagauauugcuaauucuuucuaugagguuuuugagaaguacccucauuucaucgacguguuuguccacuucggcauugcccaauccagcacacgcgggggaucuagaguggaaggcaucuuugcugggcuguucaugaacgccuacggagcgggccaggugaugcuccgguggggcguccuggccaaauccguuaagaauauuaugcuugggcacgcuagcgugcaggccgagauggaacagguggucgagguguaugaauacgcucaaaagcugggaggcgaggccggguuuuaucauauccucaacaaucccaaagccucucugcuuucccugacccaguucccucacuuuagcuccguugugcucggaaacgcugcgggccuggggaucaugggagaguaccgcggcacgcccagaaaccaggaccuguaugaugccgcuaaggccuacgccgaacagcucaaagagaauggcgucauuaacuauucugugcuggaccuuacagcugaggaacuggaagccaucaagcaucaacucaauccuaaagauaacgacguugagcugugaggacuaguguccaccugucccuccugggcugcuggauugucucguuuuccugccaaauaaacaggaucagcgcuuuacagaucuaaaaaaaaaaaaaaaaaaaaaaaaaaaaaaaaaaaaaaaaaaaaaaaaaaaaaaaaaaaaaaaaugcaucccccccccccccccccccccccccccccccaaaggcucuuuucagagccaccagaauu

SEQ ID NO: 20284 - RNA, 1465 nt, Artificial Sequence
  mRNA product Design b-3 comprising derived and/or modified sequence from HRSV(Memphis-37)__AIY60635.1__N (opt6)
gggagagucccgcagucggcguccagcggcucugcuuguucgugugugugucguugcaggccuuauucaagcuuaccauggccuuaaguaaaguaaaauuaaacgacacacuaaacaaagaccaauuacucucaucaucgaaauauacaauacaaagauccacaggagacuccauagauacaccaaauuacgacguacaaaaacauauaaacaaacucugcggaauguuauuaauaacagaagacgcaaaccacaaauucacaggagucauagguaugcuauacgcaaugucaagauuaggaagagaagauacaauaaaaauacuaagagacgcaggauaccacguaaaagcaaacggaguagacguaacaacacauagacaagauauaaacgguaaagaaaugaaauucgaaguacuaacacuagccagucuaacaacagaaauacaaauaaacauagaaauagaaagccgaaaaucauacaaaaaaauguuaaaagaaaugggggaaguagcacccgaauacagacaugauucaccugacugcggaaugauaauacucugcauagcggcauuagucauaacaaaacuagccgcaggagacagaagcggauuaacagcaguaauaagaagagcaaauaauguauuaaaaaaugaaaugaaaagguauaaaggauuacuaccaaaagauauagcaaacucauucuaugaaguuuucgaaaaauacccacacuucauagacgucuucguacacuuuggaauagcacaaagcagcacaagaggaggaagcagaguagaaggaauauucgcaggacuauucaugaaugcauacggagccggacaaguaaugcuaagauggggaguuuuagcaaaaagcguaaaaaacauaauguuaggacacgccuccguccaagccgaaauggaacaaguaguagaaguauacgaauaugcacaaaaacuaggaggagaagcaggauucuaucacauacucaauaacccaaaagcaucacuauugagcuuaacacaauucccacauuuuucauccguaguccuaggaaaugcagcaggcuuaggaauaaugggagaauacagaggcacaccaagaaaucaagacuuauacgaugcagcaaaagcauacgcagaacaacuaaaagaaaacggaguaauaaacuacucaguauuagauuuaacagcagaagaauuagaagcaauaaaacaucaacuaaauccuaaggauaaugauguagaacucuaaggacuaguguccaccugucccuccugggcugcuggauugucucguuuuccugccaaauaaacaggaucagcgcuuuacagaucuaaaaaaaaaaaaaaaaaaaaaaaaaaaaaaaaaaaaaaaaaaaaaaaaaaaaaaaaaaaaaaaaugcaucccccccccccccccccccccccccccccccaaaggcucuuuucagagccaccagaauu

SEQ ID NO: 20285 - RNA, 1465 nt, Artificial Sequence
  mRNA product Design b-3 comprising derived and/or modified sequence from HRSV(Memphis-37)__AIY60635.1__N (opt11)
gggagagucccgcagucggcguccagcggcucugcuuguucgugugugugucguugcaggccuuauucaagcuuaccauggcccuaagcaaagucaaacucaacgacacacuaaacaaagaccaacuccucagcuccagcaaauacaccauccaacgauccaccggcgacuccauagacacccccaacuacgacguccaaaaacacaucaacaaacuaugcggcaugcuccuaaucacagaagacgccaaccacaaauucaccggagucaucggcaugcucuacgccaugagccgccucggccgagaagacacaaucaaaauacuaagagacgccggcuaccacguaaaagccaacggcguagacguaaccacccaccgccaagacaucaacggcaaagaaaugaaauucgaaguucucacccucgccucacuaaccacggaaauccaaauaaacauugaaaucgaaagcagaaaauccuacaaaaagaugcuaaaagaaaugggcgagguagccccagaauaccgccacgacagccccgacugcggaaugaucauccucugcauugcagcccucgucaucaccaaacuagccgccggcgacagaagcggccuaaccgcaguaauccgccgagccaacaacguacucaaaaacgaaaugaaacgcuacaaaggccuccuccccaaagacaucgccaacagcuucuacgaaguauucgaaaaauacccgcacuucaucgacgucuucguacacuucggcauagcccaaagcagcacacgaggcggcucccgcgucgaaggaauauucgccggccuguucaugaacgcauacggagcgggccaagucaugcuccgcugggguguacuagccaaguccgucaaaaacaucaugcuagggcacgcaagcguacaagccgaaauggaacaaguagucgaagucuacgaauacgcacaaaaacuaggcggcgaagccggcuucuaccacauccuaaacaaccccaaagccucauuacucucccucacccaauuuccucacuucuccagcgucguccucggaaacgccgccggccuaggcauaaugggggaauaccgcggcaccccgcgcaaccaagaccucuacgacgcagcaaaagccuacgcagaacaacuaaaagaaaacggagucaucaacuacagcguacuggaccuaaccgccgaagaacucgaagccauaaaacaccaacucaaccccaaagacaacgacgucgagcucuaaggacuaguguccaccugucccuccugggcugcuggauugucucguuuuccugccaaauaaacaggaucagcgcuuuacagaucuaaaaaaaaaaaaaaaaaaaaaaaaaaaaaaaaaaaaaaaaaaaaaaaaaaaaaaaaaaaaaaaaugcaucccccccccccccccccccccccccccccccaaaggcucuuuucagagccaccagaauu

SEQ ID NO: 20286 - RNA, 1516 nt, Artificial Sequence
  mRNA product Design b-4 comprising derived and/or modified sequence from HRSV(Memphis-37)__AIY60635.1__N (wt)
gggagagucccgcagucggcguccagcggcucugcuuguucgugugugugucguugcaggccuuauucaagcuuaccauggcucuuagcaaagucaaguugaacgauacacucaacaaagaucaacuucugucauccagcaaauacaccauccaacggagcacaggagauaguauugauacuccuaauuaugaugugcagaaacacaucaacaaguuauguggcauguuauuaaucacagaagaugcuaaucauaaauucacugggguaauagguauguuauaugcuaugucuagauuaggaagagaagacaccauaaaaauacucagagaugcgggauaucauguaaaagcaaauggaguggauguaacaacacaucgucaagacauuaauggaaaagaaaugaaauuugaaguguuaacauuggcaagcuuaacaacugaaauucaaaucaacauugagauagaaucuaggaaauccuacaaaaaaaugcuaaaagaaaugggagagguggcuccagaauacaggcaugacucuccugauuguggaaugauaauauuauguauagcagcauuaguaauaaccaaauuagcagcaggggauagaucuggucuuacugcugugauuaggagagcuaauaauguucuaaaaaaugaaaugaaacguuauaaaggcuuacuaccaaaggauauagccaacagcuucuaugaaguguuugaaaaauauccucacuuuauagauguuuuuguucauuuugguauagcacaaucuucuaccagagguggcaguagaguugaagggauuuuugcaggauuguuuaugaaugccuauggugcagggcaagugauguuacgguggggagucuuagcaaaaucaguuaaaaauauuaugcuaggacaugcuagugugcaagcagaaauggaacaaguuguggaaguuuaugaauaugcccaaaaauuggguggagaagcaggauucuaccauauauugaacaauccaaaagcaucauuauuaucuuugacucaauuuccccacuucuccaguguaguauugggcaaugcugcuggccuaggcauaaugggagaauacagagguacaccaaggaaucaagaucuauaugaugcugcaaaggcauaugcugaacaacucaaagaaaauggugugauuaacuacaguguauuagacuugacagcagaagaacuagaggcuaucaaacaucagcuuaauccaaaagauaaugauguagagcuuugaggacuaguaauaaggaaacuguaugaaugucugugggcaggaagugaagagauccuucuguaaagguuuuuggaauuaugucugcugaauaauaaacuuuuuugaaauaauaaaucugguagaaaaaugagaucuaaaaaaaaaaaaaaaaaaaaaaaaaaaaaaaaaaaaaaaaaaaaaaaaaaaaaaaaaaaaaaaaugcaucccccccccccccccccccccccccccccccaaaggcucuuuucagagccaccagaauu

SEQ ID NO: 20287 - RNA, 1516 nt, Artificial Sequence
  mRNA product Design b-4 comprising derived and/or modified sequence from HRSV(Memphis-37)__AIY60635.1__N (opt1)
gggagagucccgcagucggcguccagcggcucugcuuguucgugugugugucguugcaggccuuauucaagcuuaccauggcccugagcaaggugaagcucaacgacacccugaacaaggaccagcugcucuccagcuccaaguacaccauccagcgcagcaccggcgacuccaucgacacccccaacuacgacguccagaagcacaucaacaagcugugcgggaugcugcucaucaccgaggacgccaaccacaaguucaccggcgugaucgggaugcuguacgcgaugagccggcugggccgcgaggacacgaucaagauccuccgggacgccggguaccacgugaaggccaacggcgucgacgugaccacccaccgccaggacaucaacggcaaggagaugaaguucgaggugcugacccuggccucccucacgaccgagauccagaucaacaucgagaucgagagccggaaguccuacaagaagaugcugaaggagaugggggaggucgccccggaguaccgccacgacagccccgacugcggcaugaucauccugugcaucgcggcccucgugaucaccaagcuggccgccggggaccgguccggccugaccgcggugauccgccgggccaacaacguccucaagaacgagaugaagcgcuacaaggggcugcugcccaaggacaucgccaacagcuucuacgagguguucgagaaguacccccacuucaucgacguguucguccacuucggcaucgcccaguccagcacgcggggcgggucccgcguggagggcaucuucgccgggcuguucaugaacgcguacggcgccggccaggugaugcugcgguggggcguccuggccaagagcgugaagaacaucaugcucgggcacgccuccgugcaggccgagauggagcaggucguggagguguacgaguacgcgcagaagcucgggggcgaggccggguucuaccacauccugaacaacccgaaggccagccuccugucccugacccaguucccccacuucagcagcgucgugcucggcaacgccgccggccuggggaucaugggcgaguaccgcgggacgccccggaaccaggaccuguacgacgcggccaaggccuacgccgagcagcucaaggagaacggcgugaucaacuacuccguccuggaccugaccgccgaggagcucgaggcgaucaagcaccagcugaaccccaaggacaacgacguggagcugugaggacuaguaauaaggaaacuguaugaaugucugugggcaggaagugaagagauccuucuguaaagguuuuuggaauuaugucugcugaauaauaaacuuuuuugaaauaauaaaucugguagaaaaaugagaucuaaaaaaaaaaaaaaaaaaaaaaaaaaaaaaaaaaaaaaaaaaaaaaaaaaaaaaaaaaaaaaaaugcaucccccccccccccccccccccccccccccccaaaggcucuuuucagagccaccagaauu

SEQ ID NO: 20288 - RNA, 1516 nt, Artificial Sequence
  mRNA product Design b-4 comprising derived and/or modified sequence from HRSV(Memphis-37)__AIY60635.1__N (opt2)
gggagagucccgcagucggcguccagcggcucugcuuguucgugugugugucguugcaggccuuauucaagcuuaccauggcccucuccaaggucaagcucaacgacacccucaacaaggaccagcuccucuccuccuccaaguacaccauccagcgcuccaccggcgacuccaucgacacccccaacuacgacguccagaagcacaucaacaagcucugcggcaugcuccucaucaccgaggacgccaaccacaaguucaccggcgucaucggcaugcucuacgccaugucccgccucggccgcgaggacaccaucaagauccuccgcgacgccggcuaccacgucaaggccaacggcgucgacgucaccacccaccgccaggacaucaacggcaaggagaugaaguucgagguccucacccucgccucccucaccaccgagauccagaucaacaucgagaucgagucccgcaaguccuacaagaagaugcucaaggagaugggcgaggucgcccccgaguaccgccacgacucccccgacugcggcaugaucauccucugcaucgccgcccucgucaucaccaagcucgccgccggcgaccgcuccggccucaccgccgucauccgccgcgccaacaacguccucaagaacgagaugaagcgcuacaagggccuccuccccaaggacaucgccaacuccuucuacgaggucuucgagaaguacccccacuucaucgacgucuucguccacuucggcaucgcccaguccuccacccgcggcggcucccgcgucgagggcaucuucgccggccucuucaugaacgccuacggcgccggccaggucaugcuccgcuggggcguccucgccaaguccgucaagaacaucaugcucggccacgccuccguccaggccgagauggagcaggucgucgaggucuacgaguacgcccagaagcucggcggcgaggccggcuucuaccacauccucaacaaccccaaggccucccuccucucccucacccaguucccccacuucuccuccgucguccucggcaacgccgccggccucggcaucaugggcgaguaccgcggcaccccccgcaaccaggaccucuacgacgccgccaaggccuacgccgagcagcucaaggagaacggcgucaucaacuacuccguccucgaccucaccgccgaggagcucgaggccaucaagcaccagcucaaccccaaggacaacgacgucgagcucugaggacuaguaauaaggaaacuguaugaaugucugugggcaggaagugaagagauccuucuguaaagguuuuuggaauuaugucugcugaauaauaaacuuuuuugaaauaauaaaucugguagaaaaaugagaucuaaaaaaaaaaaaaaaaaaaaaaaaaaaaaaaaaaaaaaaaaaaaaaaaaaaaaaaaaaaaaaaaugcaucccccccccccccccccccccccccccccccaaaggcucuuuucagagccaccagaauu

SEQ ID NO: 20289 - RNA, 1516 nt, Artificial Sequence
  mRNA product Design b-4 comprising derived and/or modified sequence from HRSV(Memphis-37)__AIY60635.1__N (opt3)
gggagagucccgcagucggcguccagcggcucugcuuguucgugugugugucguugcaggccuuauucaagcuuaccauggcccugagcaaggugaaacucaacgacacccuuaauaaggaucagcuguuguccucuucaaaauacacaauccaaagaaguacuggcgacagcauugauacgcccaacuaugacguccagaagcacauaaauaaauuaugcgggaugcugcuaaucaccgaggaugcuaaccauaaguucacaggaguuauugguaugcucuacgcaauguccaggcugggccgggaagacacuaucaagauucuucgcgaugccggguaucacgugaaagcgaauggaguagacgugaccacacaucgacaggauaucaacggcaaggagaugaaauuugaaguccugaccuuggcuucucucacuacagagauacagaucaauauugaaaucgagucgcguaagucauacaaaaagaugcugaaggagaugggugaaguggccccugaguauagacacgacagcccagauugugggaugauuauccugugcauagcagcccucguuauuaccaaauuagcugcaggagacaggaguggccugacggccgugauccggcgcgcuaacaauguccuuaagaacgaaaugaaaagauacaagggcuugcugccgaaagauauugccaauuccuucuaugagguguuugagaaguacccccauuucaucgacguauuuguucacuucgggaucgcgcaaucuagcacuaggggagguucccggguggaaggcauuuuugcagggcuauucaugaacgccuacggagcuggccaggucaugcuccgcuggggugugcuggccaaaucagugaagaauauaaugcuugggcacgcaaguguccaggcugagauggaacagguuguggagguauaugaauacgcccaaaagcugggaggcgaggcgggcuuuuaucauaucuugaacaauccuaaagccagccuccugucuuuaacccaguucccacacuuuuccucagugguccuggggaacgcagcuggacucgguauuaugggcgaguaccgagggacacccagaaaccaggaccuuuaugaugccgcuaaggccuacgcagaacagcugaaagagaauggagugaucaacuauagcguuuuggaccuaacugccgaggaacuggaagcuauaaagcaucaacucaauccuaaagauaacgacguggagcugugaggacuaguaauaaggaaacuguaugaaugucugugggcaggaagugaagagauccuucuguaaagguuuuuggaauuaugucugcugaauaauaaacuuuuuugaaauaauaaaucugguagaaaaaugagaucuaaaaaaaaaaaaaaaaaaaaaaaaaaaaaaaaaaaaaaaaaaaaaaaaaaaaaaaaaaaaaaaaugcaucccccccccccccccccccccccccccccccaaaggcucuuuucagagccaccagaauu

SEQ ID NO: 20290 - RNA, 1516 nt, Artificial Sequence
  mRNA product Design b-4 comprising derived and/or modified sequence from HRSV(Memphis-37)__AIY60635.1__N (opt4)
gggagagucccgcagucggcguccagcggcucugcuuguucgugugugugucguugcaggccuuauucaagcuuaccauggcccugagcaaggugaagcugaacgacacccugaacaaggaccagcugcugagcagcagcaaguacaccauccagagaagcaccggcgacagcaucgacacccccaacuacgacgugcagaagcacaucaacaagcugugcggcaugcugcugaucaccgaggacgccaaccacaaguucaccggcgugaucggcaugcuguacgccaugagcagacugggcagagaggacaccaucaagauccugagagacgccggcuaccacgugaaggccaacggcguggacgugaccacccacagacaggacaucaacggcaaggagaugaaguucgaggugcugacccuggccagccugaccaccgagauccagaucaacaucgagaucgagagcagaaagagcuacaagaagaugcugaaggagaugggcgagguggcccccgaguacagacacgacagccccgacugcggcaugaucauccugugcaucgccgcccuggugaucaccaagcuggccgccggcgacagaagcggccugaccgccgugaucagaagagccaacaacgugcugaagaacgagaugaagagauacaagggccugcugcccaaggacaucgccaacagcuucuacgagguguucgagaaguacccccacuucaucgacguguucgugcacuucggcaucgcccagagcagcaccagaggcggcagcagaguggagggcaucuucgccggccuguucaugaacgccuacggcgccggccaggugaugcugagauggggcgugcuggccaagagcgugaagaacaucaugcugggccacgccagcgugcaggccgagauggagcaggugguggagguguacgaguacgcccagaagcugggcggcgaggccggcuucuaccacauccugaacaaccccaaggccagccugcugagccugacccaguucccccacuucagcagcguggugcugggcaacgccgccggccugggcaucaugggcgaguacagaggcacccccagaaaccaggaccuguacgacgccgccaaggccuacgccgagcagcugaaggagaacggcgugaucaacuacagcgugcuggaccugaccgccgaggagcuggaggccaucaagcaccagcugaaccccaaggacaacgacguggagcugugaggacuaguaauaaggaaacuguaugaaugucugugggcaggaagugaagagauccuucuguaaagguuuuuggaauuaugucugcugaauaauaaacuuuuuugaaauaauaaaucugguagaaaaaugagaucuaaaaaaaaaaaaaaaaaaaaaaaaaaaaaaaaaaaaaaaaaaaaaaaaaaaaaaaaaaaaaaaaugcaucccccccccccccccccccccccccccccccaaaggcucuuuucagagccaccagaauu

SEQ ID NO: 20291 - RNA, 1516 nt, Artificial Sequence
  mRNA product Design b-4 comprising derived and/or modified sequence from HRSV(Memphis-37)__AIY60635.1__N (opt5)
gggagagucccgcagucggcguccagcggcucugcuuguucgugugugugucguugcaggccuuauucaagcuuaccauggcccugagcaaggugaaacucaacgacacccugaauaaggaucagcuucuguccucuagcaaauacacaauccaaagauccacgggcgacucuauugauacccccaacuaugacguccagaagcacaucaauaaacucugcgggaugcugcuuauuacagaggaugcuaaccauaaguucaccggaguuaucggcaugcuguacgccaugagccggcucgggcgcgaagacacaauuaagauccugagagaugcgggauaucacgugaaagcuaauggcguggacgucaccacacaucggcaggauaucaacgggaaggagaugaaauuugaagugcugacccucgccucccugacgaccgagauucagaucaauauugaaaucgagucucgcaagagcuacaaaaagaugcuuaaggagaugggagaaguugccccugaguauagacacgacuccccggauuguggcaugauuauccugugcauugcugcccucgugaucacaaaacuggcugccggcgaccggagcgggcuuaccgcggucauccgcagagccaacaaugugcugaagaacgaaaugaaacgguacaagggacuccugcccaaagauauugcuaauucuuucuaugagguuuuugagaaguacccucauuucaucgacguguuuguccacuucggcauugcccaauccagcacacgcgggggaucuagaguggaaggcaucuuugcugggcuguucaugaacgccuacggagcgggccaggugaugcuccgguggggcguccuggccaaauccguuaagaauauuaugcuugggcacgcuagcgugcaggccgagauggaacagguggucgagguguaugaauacgcucaaaagcugggaggcgaggccggguuuuaucauauccucaacaaucccaaagccucucugcuuucccugacccaguucccucacuuuagcuccguugugcucggaaacgcugcgggccuggggaucaugggagaguaccgcggcacgcccagaaaccaggaccuguaugaugccgcuaaggccuacgccgaacagcucaaagagaauggcgucauuaacuauucugugcuggaccuuacagcugaggaacuggaagccaucaagcaucaacucaauccuaaagauaacgacguugagcugugaggacuaguaauaaggaaacuguaugaaugucugugggcaggaagugaagagauccuucuguaaagguuuuuggaauuaugucugcugaauaauaaacuuuuuugaaauaauaaaucugguagaaaaaugagaucuaaaaaaaaaaaaaaaaaaaaaaaaaaaaaaaaaaaaaaaaaaaaaaaaaaaaaaaaaaaaaaaaugcaucccccccccccccccccccccccccccccccaaaggcucuuuucagagccaccagaauu

SEQ ID NO: 20292 - RNA, 1516 nt, Artificial Sequence
  mRNA product Design b-4 comprising derived and/or modified sequence from HRSV(Memphis-37)__AIY60635.1__N (opt6)
gggagagucccgcagucggcguccagcggcucugcuuguucgugugugugucguugcaggccuuauucaagcuuaccauggccuuaaguaaaguaaaauuaaacgacacacuaaacaaagaccaauuacucucaucaucgaaauauacaauacaaagauccacaggagacuccauagauacaccaaauuacgacguacaaaaacauauaaacaaacucugcggaauguuauuaauaacagaagacgcaaaccacaaauucacaggagucauagguaugcuauacgcaaugucaagauuaggaagagaagauacaauaaaaauacuaagagacgcaggauaccacguaaaagcaaacggaguagacguaacaacacauagacaagauauaaacgguaaagaaaugaaauucgaaguacuaacacuagccagucuaacaacagaaauacaaauaaacauagaaauagaaagccgaaaaucauacaaaaaaauguuaaaagaaaugggggaaguagcacccgaauacagacaugauucaccugacugcggaaugauaauacucugcauagcggcauuagucauaacaaaacuagccgcaggagacagaagcggauuaacagcaguaauaagaagagcaaauaauguauuaaaaaaugaaaugaaaagguauaaaggauuacuaccaaaagauauagcaaacucauucuaugaaguuuucgaaaaauacccacacuucauagacgucuucguacacuuuggaauagcacaaagcagcacaagaggaggaagcagaguagaaggaauauucgcaggacuauucaugaaugcauacggagccggacaaguaaugcuaagauggggaguuuuagcaaaaagcguaaaaaacauaauguuaggacacgccuccguccaagccgaaauggaacaaguaguagaaguauacgaauaugcacaaaaacuaggaggagaagcaggauucuaucacauacucaauaacccaaaagcaucacuauugagcuuaacacaauucccacauuuuucauccguaguccuaggaaaugcagcaggcuuaggaauaaugggagaauacagaggcacaccaagaaaucaagacuuauacgaugcagcaaaagcauacgcagaacaacuaaaagaaaacggaguaauaaacuacucaguauuagauuuaacagcagaagaauuagaagcaauaaaacaucaacuaaauccuaaggauaaugauguagaacucuaaggacuaguaauaaggaaacuguaugaaugucugugggcaggaagugaagagauccuucuguaaagguuuuuggaauuaugucugcugaauaauaaacuuuuuugaaauaauaaaucugguagaaaaaugagaucuaaaaaaaaaaaaaaaaaaaaaaaaaaaaaaaaaaaaaaaaaaaaaaaaaaaaaaaaaaaaaaaaugcaucccccccccccccccccccccccccccccccaaaggcucuuuucagagccaccagaauu

SEQ ID NO: 20293 - RNA, 1516 nt, Artificial Sequence
  mRNA product Design b-4 comprising derived and/or modified sequence from HRSV(Memphis-37)__AIY60635.1__N (opt11)
gggagagucccgcagucggcguccagcggcucugcuuguucgugugugugucguugcaggccuuauucaagcuuaccauggcccuaagcaaagucaaacucaacgacacacuaaacaaagaccaacuccucagcuccagcaaauacaccauccaacgauccaccggcgacuccauagacacccccaacuacgacguccaaaaacacaucaacaaacuaugcggcaugcuccuaaucacagaagacgccaaccacaaauucaccggagucaucggcaugcucuacgccaugagccgccucggccgagaagacacaaucaaaauacuaagagacgccggcuaccacguaaaagccaacggcguagacguaaccacccaccgccaagacaucaacggcaaagaaaugaaauucgaaguucucacccucgccucacuaaccacggaaauccaaauaaacauugaaaucgaaagcagaaaauccuacaaaaagaugcuaaaagaaaugggcgagguagccccagaauaccgccacgacagccccgacugcggaaugaucauccucugcauugcagcccucgucaucaccaaacuagccgccggcgacagaagcggccuaaccgcaguaauccgccgagccaacaacguacucaaaaacgaaaugaaacgcuacaaaggccuccuccccaaagacaucgccaacagcuucuacgaaguauucgaaaaauacccgcacuucaucgacgucuucguacacuucggcauagcccaaagcagcacacgaggcggcucccgcgucgaaggaauauucgccggccuguucaugaacgcauacggagcgggccaagucaugcuccgcugggguguacuagccaaguccgucaaaaacaucaugcuagggcacgcaagcguacaagccgaaauggaacaaguagucgaagucuacgaauacgcacaaaaacuaggcggcgaagccggcuucuaccacauccuaaacaaccccaaagccucauuacucucccucacccaauuuccucacuucuccagcgucguccucggaaacgccgccggccuaggcauaaugggggaauaccgcggcaccccgcgcaaccaagaccucuacgacgcagcaaaagccuacgcagaacaacuaaaagaaaacggagucaucaacuacagcguacuggaccuaaccgccgaagaacucgaagccauaaaacaccaacucaaccccaaagacaacgacgucgagcucuaaggacuaguaauaaggaaacuguaugaaugucugugggcaggaagugaagagauccuucuguaaagguuuuuggaauuaugucugcugaauaauaaacuuuuuugaaauaauaaaucugguagaaaaaugagaucuaaaaaaaaaaaaaaaaaaaaaaaaaaaaaaaaaaaaaaaaaaaaaaaaaaaaaaaaaaaaaaaaugcaucccccccccccccccccccccccccccccccaaaggcucuuuucagagccaccagaauu

SEQ ID NO: 20294 - RNA, 1578 nt, Artificial Sequence
  mRNA product Design b-5 comprising derived and/or modified sequence from HRSV(Memphis-37)__AIY60635.1__N (wt)
gggagacuccugucgggcggaaguaggaggaguagaguuuaaaaacaguacucuuuuuccgguucgggacguaguugaagcaacgacaagccggauaaccgcucuugagacaggaagcuuaccauggcucuuagcaaagucaaguugaacgauacacucaacaaagaucaacuucugucauccagcaaauacaccauccaacggagcacaggagauaguauugauacuccuaauuaugaugugcagaaacacaucaacaaguuauguggcauguuauuaaucacagaagaugcuaaucauaaauucacugggguaauagguauguuauaugcuaugucuagauuaggaagagaagacaccauaaaaauacucagagaugcgggauaucauguaaaagcaaauggaguggauguaacaacacaucgucaagacauuaauggaaaagaaaugaaauuugaaguguuaacauuggcaagcuuaacaacugaaauucaaaucaacauugagauagaaucuaggaaauccuacaaaaaaaugcuaaaagaaaugggagagguggcuccagaauacaggcaugacucuccugauuguggaaugauaauauuauguauagcagcauuaguaauaaccaaauuagcagcaggggauagaucuggucuuacugcugugauuaggagagcuaauaauguucuaaaaaaugaaaugaaacguuauaaaggcuuacuaccaaaggauauagccaacagcuucuaugaaguguuugaaaaauauccucacuuuauagauguuuuuguucauuuugguauagcacaaucuucuaccagagguggcaguagaguugaagggauuuuugcaggauuguuuaugaaugccuauggugcagggcaagugauguuacgguggggagucuuagcaaaaucaguuaaaaauauuaugcuaggacaugcuagugugcaagcagaaauggaacaaguuguggaaguuuaugaauaugcccaaaaauuggguggagaagcaggauucuaccauauauugaacaauccaaaagcaucauuauuaucuuugacucaauuuccccacuucuccaguguaguauugggcaaugcugcuggccuaggcauaaugggagaauacagagguacaccaaggaaucaagaucuauaugaugcugcaaaggcauaugcugaacaacucaaagaaaauggugugauuaacuacaguguauuagacuugacagcagaagaacuagaggcuaucaaacaucagcuuaauccaaaagauaaugauguagagcuuugaggacuaguacuggcugcaucucccuuuccucuguccuccauccuucucccaggauggugaagggggaccugguacccagugauccccaccccaggauccuaaaucaugacuuaccugcuaauaaaaacucauuggaaaagugagaagaucuaaaaaaaaaaaaaaaaaaaaaaaaaaaaaaaaaaaaaaaaaaaaaaaaaaaaaaaaaaaaaaaaugcaucccccccccccccccccccccccccccccccaaaggcucuuuucagagccaccagaauu

SEQ ID NO: 20295 - RNA, 1578 nt, Artificial Sequence
  mRNA product Design b-5 comprising derived and/or modified sequence from HRSV(Memphis-37)__AIY60635.1__N (opt1)
gggagacuccugucgggcggaaguaggaggaguagaguuuaaaaacaguacucuuuuuccgguucgggacguaguugaagcaacgacaagccggauaaccgcucuugagacaggaagcuuaccauggcccugagcaaggugaagcucaacgacacccugaacaaggaccagcugcucuccagcuccaaguacaccauccagcgcagcaccggcgacuccaucgacacccccaacuacgacguccagaagcacaucaacaagcugugcgggaugcugcucaucaccgaggacgccaaccacaaguucaccggcgugaucgggaugcuguacgcgaugagccggcugggccgcgaggacacgaucaagauccuccgggacgccggguaccacgugaaggccaacggcgucgacgugaccacccaccgccaggacaucaacggcaaggagaugaaguucgaggugcugacccuggccucccucacgaccgagauccagaucaacaucgagaucgagagccggaaguccuacaagaagaugcugaaggagaugggggaggucgccccggaguaccgccacgacagccccgacugcggcaugaucauccugugcaucgcggcccucgugaucaccaagcuggccgccggggaccgguccggccugaccgcggugauccgccgggccaacaacguccucaagaacgagaugaagcgcuacaaggggcugcugcccaaggacaucgccaacagcuucuacgagguguucgagaaguacccccacuucaucgacguguucguccacuucggcaucgcccaguccagcacgcggggcgggucccgcguggagggcaucuucgccgggcuguucaugaacgcguacggcgccggccaggugaugcugcgguggggcguccuggccaagagcgugaagaacaucaugcucgggcacgccuccgugcaggccgagauggagcaggucguggagguguacgaguacgcgcagaagcucgggggcgaggccggguucuaccacauccugaacaacccgaaggccagccuccugucccugacccaguucccccacuucagcagcgucgugcucggcaacgccgccggccuggggaucaugggcgaguaccgcgggacgccccggaaccaggaccuguacgacgcggccaaggccuacgccgagcagcucaaggagaacggcgugaucaacuacuccguccuggaccugaccgccgaggagcucgaggcgaucaagcaccagcugaaccccaaggacaacgacguggagcugugaggacuaguacuggcugcaucucccuuuccucuguccuccauccuucucccaggauggugaagggggaccugguacccagugauccccaccccaggauccuaaaucaugacuuaccugcuaauaaaaacucauuggaaaagugagaagaucuaaaaaaaaaaaaaaaaaaaaaaaaaaaaaaaaaaaaaaaaaaaaaaaaaaaaaaaaaaaaaaaaugcaucccccccccccccccccccccccccccccccaaaggcucuuuucagagccaccagaauu

SEQ ID NO: 20296 - RNA, 1578 nt, Artificial Sequence
  mRNA product Design b-5 comprising derived and/or modified sequence from HRSV(Memphis-37)__AIY60635.1__N (opt2)
gggagacuccugucgggcggaaguaggaggaguagaguuuaaaaacaguacucuuuuuccgguucgggacguaguugaagcaacgacaagccggauaaccgcucuugagacaggaagcuuaccauggcccucuccaaggucaagcucaacgacacccucaacaaggaccagcuccucuccuccuccaaguacaccauccagcgcuccaccggcgacuccaucgacacccccaacuacgacguccagaagcacaucaacaagcucugcggcaugcuccucaucaccgaggacgccaaccacaaguucaccggcgucaucggcaugcucuacgccaugucccgccucggccgcgaggacaccaucaagauccuccgcgacgccggcuaccacgucaaggccaacggcgucgacgucaccacccaccgccaggacaucaacggcaaggagaugaaguucgagguccucacccucgccucccucaccaccgagauccagaucaacaucgagaucgagucccgcaaguccuacaagaagaugcucaaggagaugggcgaggucgcccccgaguaccgccacgacucccccgacugcggcaugaucauccucugcaucgccgcccucgucaucaccaagcucgccgccggcgaccgcuccggccucaccgccgucauccgccgcgccaacaacguccucaagaacgagaugaagcgcuacaagggccuccuccccaaggacaucgccaacuccuucuacgaggucuucgagaaguacccccacuucaucgacgucuucguccacuucggcaucgcccaguccuccacccgcggcggcucccgcgucgagggcaucuucgccggccucuucaugaacgccuacggcgccggccaggucaugcuccgcuggggcguccucgccaaguccgucaagaacaucaugcucggccacgccuccguccaggccgagauggagcaggucgucgaggucuacgaguacgcccagaagcucggcggcgaggccggcuucuaccacauccucaacaaccccaaggccucccuccucucccucacccaguucccccacuucuccuccgucguccucggcaacgccgccggccucggcaucaugggcgaguaccgcggcaccccccgcaaccaggaccucuacgacgccgccaaggccuacgccgagcagcucaaggagaacggcgucaucaacuacuccguccucgaccucaccgccgaggagcucgaggccaucaagcaccagcucaaccccaaggacaacgacgucgagcucugaggacuaguacuggcugcaucucccuuuccucuguccuccauccuucucccaggauggugaagggggaccugguacccagugauccccaccccaggauccuaaaucaugacuuaccugcuaauaaaaacucauuggaaaagugagaagaucuaaaaaaaaaaaaaaaaaaaaaaaaaaaaaaaaaaaaaaaaaaaaaaaaaaaaaaaaaaaaaaaaugcaucccccccccccccccccccccccccccccccaaaggcucuuuucagagccaccagaauu

SEQ ID NO: 20297 - RNA, 1578 nt, Artificial Sequence
  mRNA product Design b-5 comprising derived and/or modified sequence from HRSV(Memphis-37)__AIY60635.1__N (opt3)
gggagacuccugucgggcggaaguaggaggaguagaguuuaaaaacaguacucuuuuuccgguucgggacguaguugaagcaacgacaagccggauaaccgcucuugagacaggaagcuuaccauggcccugagcaaggugaaacucaacgacacccuuaauaaggaucagcuguuguccucuucaaaauacacaauccaaagaaguacuggcgacagcauugauacgcccaacuaugacguccagaagcacauaaauaaauuaugcgggaugcugcuaaucaccgaggaugcuaaccauaaguucacaggaguuauugguaugcucuacgcaauguccaggcugggccgggaagacacuaucaagauucuucgcgaugccggguaucacgugaaagcgaauggaguagacgugaccacacaucgacaggauaucaacggcaaggagaugaaauuugaaguccugaccuuggcuucucucacuacagagauacagaucaauauugaaaucgagucgcguaagucauacaaaaagaugcugaaggagaugggugaaguggccccugaguauagacacgacagcccagauugugggaugauuauccugugcauagcagcccucguuauuaccaaauuagcugcaggagacaggaguggccugacggccgugauccggcgcgcuaacaauguccuuaagaacgaaaugaaaagauacaagggcuugcugccgaaagauauugccaauuccuucuaugagguguuugagaaguacccccauuucaucgacguauuuguucacuucgggaucgcgcaaucuagcacuaggggagguucccggguggaaggcauuuuugcagggcuauucaugaacgccuacggagcuggccaggucaugcuccgcuggggugugcuggccaaaucagugaagaauauaaugcuugggcacgcaaguguccaggcugagauggaacagguuguggagguauaugaauacgcccaaaagcugggaggcgaggcgggcuuuuaucauaucuugaacaauccuaaagccagccuccugucuuuaacccaguucccacacuuuuccucagugguccuggggaacgcagcuggacucgguauuaugggcgaguaccgagggacacccagaaaccaggaccuuuaugaugccgcuaaggccuacgcagaacagcugaaagagaauggagugaucaacuauagcguuuuggaccuaacugccgaggaacuggaagcuauaaagcaucaacucaauccuaaagauaacgacguggagcugugaggacuaguacuggcugcaucucccuuuccucuguccuccauccuucucccaggauggugaagggggaccugguacccagugauccccaccccaggauccuaaaucaugacuuaccugcuaauaaaaacucauuggaaaagugagaagaucuaaaaaaaaaaaaaaaaaaaaaaaaaaaaaaaaaaaaaaaaaaaaaaaaaaaaaaaaaaaaaaaaugcaucccccccccccccccccccccccccccccccaaaggcucuuuucagagccaccagaauu

SEQ ID NO: 20298 - RNA, 1578 nt, Artificial Sequence
  mRNA product Design b-5 comprising derived and/or modified sequence from HRSV(Memphis-37)__AIY60635.1__N (opt4)
gggagacuccugucgggcggaaguaggaggaguagaguuuaaaaacaguacucuuuuuccgguucgggacguaguugaagcaacgacaagccggauaaccgcucuugagacaggaagcuuaccauggcccugagcaaggugaagcugaacgacacccugaacaaggaccagcugcugagcagcagcaaguacaccauccagagaagcaccggcgacagcaucgacacccccaacuacgacgugcagaagcacaucaacaagcugugcggcaugcugcugaucaccgaggacgccaaccacaaguucaccggcgugaucggcaugcuguacgccaugagcagacugggcagagaggacaccaucaagauccugagagacgccggcuaccacgugaaggccaacggcguggacgugaccacccacagacaggacaucaacggcaaggagaugaaguucgaggugcugacccuggccagccugaccaccgagauccagaucaacaucgagaucgagagcagaaagagcuacaagaagaugcugaaggagaugggcgagguggcccccgaguacagacacgacagccccgacugcggcaugaucauccugugcaucgccgcccuggugaucaccaagcuggccgccggcgacagaagcggccugaccgccgugaucagaagagccaacaacgugcugaagaacgagaugaagagauacaagggccugcugcccaaggacaucgccaacagcuucuacgagguguucgagaaguacccccacuucaucgacguguucgugcacuucggcaucgcccagagcagcaccagaggcggcagcagaguggagggcaucuucgccggccuguucaugaacgccuacggcgccggccaggugaugcugagauggggcgugcuggccaagagcgugaagaacaucaugcugggccacgccagcgugcaggccgagauggagcaggugguggagguguacgaguacgcccagaagcugggcggcgaggccggcuucuaccacauccugaacaaccccaaggccagccugcugagccugacccaguucccccacuucagcagcguggugcugggcaacgccgccggccugggcaucaugggcgaguacagaggcacccccagaaaccaggaccuguacgacgccgccaaggccuacgccgagcagcugaaggagaacggcgugaucaacuacagcgugcuggaccugaccgccgaggagcuggaggccaucaagcaccagcugaaccccaaggacaacgacguggagcugugaggacuaguacuggcugcaucucccuuuccucuguccuccauccuucucccaggauggugaagggggaccugguacccagugauccccaccccaggauccuaaaucaugacuuaccugcuaauaaaaacucauuggaaaagugagaagaucuaaaaaaaaaaaaaaaaaaaaaaaaaaaaaaaaaaaaaaaaaaaaaaaaaaaaaaaaaaaaaaaaugcaucccccccccccccccccccccccccccccccaaaggcucuuuucagagccaccagaauu

SEQ ID NO: 20299 - RNA, 1578 nt, Artificial Sequence
  mRNA product Design b-5 comprising derived and/or modified sequence from HRSV(Memphis-37)__AIY60635.1__N (opt5)
gggagacuccugucgggcggaaguaggaggaguagaguuuaaaaacaguacucuuuuuccgguucgggacguaguugaagcaacgacaagccggauaaccgcucuugagacaggaagcuuaccauggcccugagcaaggugaaacucaacgacacccugaauaaggaucagcuucuguccucuagcaaauacacaauccaaagauccacgggcgacucuauugauacccccaacuaugacguccagaagcacaucaauaaacucugcgggaugcugcuuauuacagaggaugcuaaccauaaguucaccggaguuaucggcaugcuguacgccaugagccggcucgggcgcgaagacacaauuaagauccugagagaugcgggauaucacgugaaagcuaauggcguggacgucaccacacaucggcaggauaucaacgggaaggagaugaaauuugaagugcugacccucgccucccugacgaccgagauucagaucaauauugaaaucgagucucgcaagagcuacaaaaagaugcuuaaggagaugggagaaguugccccugaguauagacacgacuccccggauuguggcaugauuauccugugcauugcugcccucgugaucacaaaacuggcugccggcgaccggagcgggcuuaccgcggucauccgcagagccaacaaugugcugaagaacgaaaugaaacgguacaagggacuccugcccaaagauauugcuaauucuuucuaugagguuuuugagaaguacccucauuucaucgacguguuuguccacuucggcauugcccaauccagcacacgcgggggaucuagaguggaaggcaucuuugcugggcuguucaugaacgccuacggagcgggccaggugaugcuccgguggggcguccuggccaaauccguuaagaauauuaugcuugggcacgcuagcgugcaggccgagauggaacagguggucgagguguaugaauacgcucaaaagcugggaggcgaggccggguuuuaucauauccucaacaaucccaaagccucucugcuuucccugacccaguucccucacuuuagcuccguugugcucggaaacgcugcgggccuggggaucaugggagaguaccgcggcacgcccagaaaccaggaccuguaugaugccgcuaaggccuacgccgaacagcucaaagagaauggcgucauuaacuauucugugcuggaccuuacagcugaggaacuggaagccaucaagcaucaacucaauccuaaagauaacgacguugagcugugaggacuaguacuggcugcaucucccuuuccucuguccuccauccuucucccaggauggugaagggggaccugguacccagugauccccaccccaggauccuaaaucaugacuuaccugcuaauaaaaacucauuggaaaagugagaagaucuaaaaaaaaaaaaaaaaaaaaaaaaaaaaaaaaaaaaaaaaaaaaaaaaaaaaaaaaaaaaaaaaugcaucccccccccccccccccccccccccccccccaaaggcucuuuucagagccaccagaauu

SEQ ID NO: 20300 - RNA, 1578 nt, Artificial Sequence
  mRNA product Design b-5 comprising derived and/or modified sequence from HRSV(Memphis-37)__AIY60635.1__N (opt6)
gggagacuccugucgggcggaaguaggaggaguagaguuuaaaaacaguacucuuuuuccgguucgggacguaguugaagcaacgacaagccggauaaccgcucuugagacaggaagcuuaccauggccuuaaguaaaguaaaauuaaacgacacacuaaacaaagaccaauuacucucaucaucgaaauauacaauacaaagauccacaggagacuccauagauacaccaaauuacgacguacaaaaacauauaaacaaacucugcggaauguuauuaauaacagaagacgcaaaccacaaauucacaggagucauagguaugcuauacgcaaugucaagauuaggaagagaagauacaauaaaaauacuaagagacgcaggauaccacguaaaagcaaacggaguagacguaacaacacauagacaagauauaaacgguaaagaaaugaaauucgaaguacuaacacuagccagucuaacaacagaaauacaaauaaacauagaaauagaaagccgaaaaucauacaaaaaaauguuaaaagaaaugggggaaguagcacccgaauacagacaugauucaccugacugcggaaugauaauacucugcauagcggcauuagucauaacaaaacuagccgcaggagacagaagcggauuaacagcaguaauaagaagagcaaauaauguauuaaaaaaugaaaugaaaagguauaaaggauuacuaccaaaagauauagcaaacucauucuaugaaguuuucgaaaaauacccacacuucauagacgucuucguacacuuuggaauagcacaaagcagcacaagaggaggaagcagaguagaaggaauauucgcaggacuauucaugaaugcauacggagccggacaaguaaugcuaagauggggaguuuuagcaaaaagcguaaaaaacauaauguuaggacacgccuccguccaagccgaaauggaacaaguaguagaaguauacgaauaugcacaaaaacuaggaggagaagcaggauucuaucacauacucaauaacccaaaagcaucacuauugagcuuaacacaauucccacauuuuucauccguaguccuaggaaaugcagcaggcuuaggaauaaugggagaauacagaggcacaccaagaaaucaagacuuauacgaugcagcaaaagcauacgcagaacaacuaaaagaaaacggaguaauaaacuacucaguauuagauuuaacagcagaagaauuagaagcaauaaaacaucaacuaaauccuaaggauaaugauguagaacucuaaggacuaguacuggcugcaucucccuuuccucuguccuccauccuucucccaggauggugaagggggaccugguacccagugauccccaccccaggauccuaaaucaugacuuaccugcuaauaaaaacucauuggaaaagugagaagaucuaaaaaaaaaaaaaaaaaaaaaaaaaaaaaaaaaaaaaaaaaaaaaaaaaaaaaaaaaaaaaaaaugcaucccccccccccccccccccccccccccccccaaaggcucuuuucagagccaccagaauu

SEQ ID NO: 20301 - RNA, 1578 nt, Artificial Sequence
  mRNA product Design b-5 comprising derived and/or modified sequence from HRSV(Memphis-37)__AIY60635.1__N (opt11)
gggagacuccugucgggcggaaguaggaggaguagaguuuaaaaacaguacucuuuuuccgguucgggacguaguugaagcaacgacaagccggauaaccgcucuugagacaggaagcuuaccauggcccuaagcaaagucaaacucaacgacacacuaaacaaagaccaacuccucagcuccagcaaauacaccauccaacgauccaccggcgacuccauagacacccccaacuacgacguccaaaaacacaucaacaaacuaugcggcaugcuccuaaucacagaagacgccaaccacaaauucaccggagucaucggcaugcucuacgccaugagccgccucggccgagaagacacaaucaaaauacuaagagacgccggcuaccacguaaaagccaacggcguagacguaaccacccaccgccaagacaucaacggcaaagaaaugaaauucgaaguucucacccucgccucacuaaccacggaaauccaaauaaacauugaaaucgaaagcagaaaauccuacaaaaagaugcuaaaagaaaugggcgagguagccccagaauaccgccacgacagccccgacugcggaaugaucauccucugcauugcagcccucgucaucaccaaacuagccgccggcgacagaagcggccuaaccgcaguaauccgccgagccaacaacguacucaaaaacgaaaugaaacgcuacaaaggccuccuccccaaagacaucgccaacagcuucuacgaaguauucgaaaaauacccgcacuucaucgacgucuucguacacuucggcauagcccaaagcagcacacgaggcggcucccgcgucgaaggaauauucgccggccuguucaugaacgcauacggagcgggccaagucaugcuccgcugggguguacuagccaaguccgucaaaaacaucaugcuagggcacgcaagcguacaagccgaaauggaacaaguagucgaagucuacgaauacgcacaaaaacuaggcggcgaagccggcuucuaccacauccuaaacaaccccaaagccucauuacucucccucacccaauuuccucacuucuccagcgucguccucggaaacgccgccggccuaggcauaaugggggaauaccgcggcaccccgcgcaaccaagaccucuacgacgcagcaaaagccuacgcagaacaacuaaaagaaaacggagucaucaacuacagcguacuggaccuaaccgccgaagaacucgaagccauaaaacaccaacucaaccccaaagacaacgacgucgagcucuaaggacuaguacuggcugcaucucccuuuccucuguccuccauccuucucccaggauggugaagggggaccugguacccagugauccccaccccaggauccuaaaucaugacuuaccugcuaauaaaaacucauuggaaaagugagaagaucuaaaaaaaaaaaaaaaaaaaaaaaaaaaaaaaaaaaaaaaaaaaaaaaaaaaaaaaaaaaaaaaaugcaucccccccccccccccccccccccccccccccaaaggcucuuuucagagccaccagaauu

SEQ ID NO: 20302 - RNA, 1484 nt, Artificial Sequence
  mRNA product Design c-1 comprising derived and/or modified sequence from HRSV(Memphis-37)__AIY60635.1__N (wt)
gggagaguccgcucagccagguugcagaagcggcuuagcguguguccuaaucuucucucugcguguagguaggccugugccgcaaacaagcuuaccauggcucuuagcaaagucaaguugaacgauacacucaacaaagaucaacuucugucauccagcaaauacaccauccaacggagcacaggagauaguauugauacuccuaauuaugaugugcagaaacacaucaacaaguuauguggcauguuauuaaucacagaagaugcuaaucauaaauucacugggguaauagguauguuauaugcuaugucuagauuaggaagagaagacaccauaaaaauacucagagaugcgggauaucauguaaaagcaaauggaguggauguaacaacacaucgucaagacauuaauggaaaagaaaugaaauuugaaguguuaacauuggcaagcuuaacaacugaaauucaaaucaacauugagauagaaucuaggaaauccuacaaaaaaaugcuaaaagaaaugggagagguggcuccagaauacaggcaugacucuccugauuguggaaugauaauauuauguauagcagcauuaguaauaaccaaauuagcagcaggggauagaucuggucuuacugcugugauuaggagagcuaauaauguucuaaaaaaugaaaugaaacguuauaaaggcuuacuaccaaaggauauagccaacagcuucuaugaaguguuugaaaaauauccucacuuuauagauguuuuuguucauuuugguauagcacaaucuucuaccagagguggcaguagaguugaagggauuuuugcaggauuguuuaugaaugccuauggugcagggcaagugauguuacgguggggagucuuagcaaaaucaguuaaaaauauuaugcuaggacaugcuagugugcaagcagaaauggaacaaguuguggaaguuuaugaauaugcccaaaaauuggguggagaagcaggauucuaccauauauugaacaauccaaaagcaucauuauuaucuuugacucaauuuccccacuucuccaguguaguauugggcaaugcugcuggccuaggcauaaugggagaauacagagguacaccaaggaaucaagaucuauaugaugcugcaaaggcauaugcugaacaacucaaagaaaauggugugauuaacuacaguguauuagacuugacagcagaagaacuagaggcuaucaaacaucagcuuaauccaaaagauaaugauguagagcuuugaggacuaguguccaccugucccuccugggcugcuggauugucucguuuuccugccaaauaaacaggaucagcgcuuuacagaucuaaaaaaaaaaaaaaaaaaaaaaaaaaaaaaaaaaaaaaaaaaaaaaaaaaaaaaaaaaaaaaaaugcaucccccccccccccccccccccccccccccccaaaggcucuuuucagagccaccagaauu

SEQ ID NO: 20303 - RNA, 1484 nt, Artificial Sequence
  mRNA product Design c-1 comprising derived and/or modified sequence from HRSV(Memphis-37)__AIY60635.1__N (opt1)
gggagaguccgcucagccagguugcagaagcggcuuagcguguguccuaaucuucucucugcguguagguaggccugugccgcaaacaagcuuaccauggcccugagcaaggugaagcucaacgacacccugaacaaggaccagcugcucuccagcuccaaguacaccauccagcgcagcaccggcgacuccaucgacacccccaacuacgacguccagaagcacaucaacaagcugugcgggaugcugcucaucaccgaggacgccaaccacaaguucaccggcgugaucgggaugcuguacgcgaugagccggcugggccgcgaggacacgaucaagauccuccgggacgccggguaccacgugaaggccaacggcgucgacgugaccacccaccgccaggacaucaacggcaaggagaugaaguucgaggugcugacccuggccucccucacgaccgagauccagaucaacaucgagaucgagagccggaaguccuacaagaagaugcugaaggagaugggggaggucgccccggaguaccgccacgacagccccgacugcggcaugaucauccugugcaucgcggcccucgugaucaccaagcuggccgccggggaccgguccggccugaccgcggugauccgccgggccaacaacguccucaagaacgagaugaagcgcuacaaggggcugcugcccaaggacaucgccaacagcuucuacgagguguucgagaaguacccccacuucaucgacguguucguccacuucggcaucgcccaguccagcacgcggggcgggucccgcguggagggcaucuucgccgggcuguucaugaacgcguacggcgccggccaggugaugcugcgguggggcguccuggccaagagcgugaagaacaucaugcucgggcacgccuccgugcaggccgagauggagcaggucguggagguguacgaguacgcgcagaagcucgggggcgaggccggguucuaccacauccugaacaacccgaaggccagccuccugucccugacccaguucccccacuucagcagcgucgugcucggcaacgccgccggccuggggaucaugggcgaguaccgcgggacgccccggaaccaggaccuguacgacgcggccaaggccuacgccgagcagcucaaggagaacggcgugaucaacuacuccguccuggaccugaccgccgaggagcucgaggcgaucaagcaccagcugaaccccaaggacaacgacguggagcugugaggacuaguguccaccugucccuccugggcugcuggauugucucguuuuccugccaaauaaacaggaucagcgcuuuacagaucuaaaaaaaaaaaaaaaaaaaaaaaaaaaaaaaaaaaaaaaaaaaaaaaaaaaaaaaaaaaaaaaaugcaucccccccccccccccccccccccccccccccaaaggcucuuuucagagccaccagaauu

SEQ ID NO: 20304 - RNA, 1484 nt, Artificial Sequence
  mRNA product Design c-1 comprising derived and/or modified sequence from HRSV(Memphis-37)__AIY60635.1__N (opt2)
gggagaguccgcucagccagguugcagaagcggcuuagcguguguccuaaucuucucucugcguguagguaggccugugccgcaaacaagcuuaccauggcccucuccaaggucaagcucaacgacacccucaacaaggaccagcuccucuccuccuccaaguacaccauccagcgcuccaccggcgacuccaucgacacccccaacuacgacguccagaagcacaucaacaagcucugcggcaugcuccucaucaccgaggacgccaaccacaaguucaccggcgucaucggcaugcucuacgccaugucccgccucggccgcgaggacaccaucaagauccuccgcgacgccggcuaccacgucaaggccaacggcgucgacgucaccacccaccgccaggacaucaacggcaaggagaugaaguucgagguccucacccucgccucccucaccaccgagauccagaucaacaucgagaucgagucccgcaaguccuacaagaagaugcucaaggagaugggcgaggucgcccccgaguaccgccacgacucccccgacugcggcaugaucauccucugcaucgccgcccucgucaucaccaagcucgccgccggcgaccgcuccggccucaccgccgucauccgccgcgccaacaacguccucaagaacgagaugaagcgcuacaagggccuccuccccaaggacaucgccaacuccuucuacgaggucuucgagaaguacccccacuucaucgacgucuucguccacuucggcaucgcccaguccuccacccgcggcggcucccgcgucgagggcaucuucgccggccucuucaugaacgccuacggcgccggccaggucaugcuccgcuggggcguccucgccaaguccgucaagaacaucaugcucggccacgccuccguccaggccgagauggagcaggucgucgaggucuacgaguacgcccagaagcucggcggcgaggccggcuucuaccacauccucaacaaccccaaggccucccuccucucccucacccaguucccccacuucuccuccgucguccucggcaacgccgccggccucggcaucaugggcgaguaccgcggcaccccccgcaaccaggaccucuacgacgccgccaaggccuacgccgagcagcucaaggagaacggcgucaucaacuacuccguccucgaccucaccgccgaggagcucgaggccaucaagcaccagcucaaccccaaggacaacgacgucgagcucugaggacuaguguccaccugucccuccugggcugcuggauugucucguuuuccugccaaauaaacaggaucagcgcuuuacagaucuaaaaaaaaaaaaaaaaaaaaaaaaaaaaaaaaaaaaaaaaaaaaaaaaaaaaaaaaaaaaaaaaugcaucccccccccccccccccccccccccccccccaaaggcucuuuucagagccaccagaauu

SEQ ID NO: 20305 - RNA, 1484 nt, Artificial Sequence
  mRNA product Design c-1 comprising derived and/or modified sequence from HRSV(Memphis-37)__AIY60635.1__N (opt3)
gggagaguccgcucagccagguugcagaagcggcuuagcguguguccuaaucuucucucugcguguagguaggccugugccgcaaacaagcuuaccauggcccugagcaaggugaaacucaacgacacccuuaauaaggaucagcuguuguccucuucaaaauacacaauccaaagaaguacuggcgacagcauugauacgcccaacuaugacguccagaagcacauaaauaaauuaugcgggaugcugcuaaucaccgaggaugcuaaccauaaguucacaggaguuauugguaugcucuacgcaauguccaggcugggccgggaagacacuaucaagauucuucgcgaugccggguaucacgugaaagcgaauggaguagacgugaccacacaucgacaggauaucaacggcaaggagaugaaauuugaaguccugaccuuggcuucucucacuacagagauacagaucaauauugaaaucgagucgcguaagucauacaaaaagaugcugaaggagaugggugaaguggccccugaguauagacacgacagcccagauugugggaugauuauccugugcauagcagcccucguuauuaccaaauuagcugcaggagacaggaguggccugacggccgugauccggcgcgcuaacaauguccuuaagaacgaaaugaaaagauacaagggcuugcugccgaaagauauugccaauuccuucuaugagguguuugagaaguacccccauuucaucgacguauuuguucacuucgggaucgcgcaaucuagcacuaggggagguucccggguggaaggcauuuuugcagggcuauucaugaacgccuacggagcuggccaggucaugcuccgcuggggugugcuggccaaaucagugaagaauauaaugcuugggcacgcaaguguccaggcugagauggaacagguuguggagguauaugaauacgcccaaaagcugggaggcgaggcgggcuuuuaucauaucuugaacaauccuaaagccagccuccugucuuuaacccaguucccacacuuuuccucagugguccuggggaacgcagcuggacucgguauuaugggcgaguaccgagggacacccagaaaccaggaccuuuaugaugccgcuaaggccuacgcagaacagcugaaagagaauggagugaucaacuauagcguuuuggaccuaacugccgaggaacuggaagcuauaaagcaucaacucaauccuaaagauaacgacguggagcugugaggacuaguguccaccugucccuccugggcugcuggauugucucguuuuccugccaaauaaacaggaucagcgcuuuacagaucuaaaaaaaaaaaaaaaaaaaaaaaaaaaaaaaaaaaaaaaaaaaaaaaaaaaaaaaaaaaaaaaaugcaucccccccccccccccccccccccccccccccaaaggcucuuuucagagccaccagaauu

SEQ ID NO: 20306 - RNA, 1484 nt, Artificial Sequence
  mRNA product Design c-1 comprising derived and/or modified sequence from HRSV(Memphis-37)__AIY60635.1__N (opt4)
gggagaguccgcucagccagguugcagaagcggcuuagcguguguccuaaucuucucucugcguguagguaggccugugccgcaaacaagcuuaccauggcccugagcaaggugaagcugaacgacacccugaacaaggaccagcugcugagcagcagcaaguacaccauccagagaagcaccggcgacagcaucgacacccccaacuacgacgugcagaagcacaucaacaagcugugcggcaugcugcugaucaccgaggacgccaaccacaaguucaccggcgugaucggcaugcuguacgccaugagcagacugggcagagaggacaccaucaagauccugagagacgccggcuaccacgugaaggccaacggcguggacgugaccacccacagacaggacaucaacggcaaggagaugaaguucgaggugcugacccuggccagccugaccaccgagauccagaucaacaucgagaucgagagcagaaagagcuacaagaagaugcugaaggagaugggcgagguggcccccgaguacagacacgacagccccgacugcggcaugaucauccugugcaucgccgcccuggugaucaccaagcuggccgccggcgacagaagcggccugaccgccgugaucagaagagccaacaacgugcugaagaacgagaugaagagauacaagggccugcugcccaaggacaucgccaacagcuucuacgagguguucgagaaguacccccacuucaucgacguguucgugcacuucggcaucgcccagagcagcaccagaggcggcagcagaguggagggcaucuucgccggccuguucaugaacgccuacggcgccggccaggugaugcugagauggggcgugcuggccaagagcgugaagaacaucaugcugggccacgccagcgugcaggccgagauggagcaggugguggagguguacgaguacgcccagaagcugggcggcgaggccggcuucuaccacauccugaacaaccccaaggccagccugcugagccugacccaguucccccacuucagcagcguggugcugggcaacgccgccggccugggcaucaugggcgaguacagaggcacccccagaaaccaggaccuguacgacgccgccaaggccuacgccgagcagcugaaggagaacggcgugaucaacuacagcgugcuggaccugaccgccgaggagcuggaggccaucaagcaccagcugaaccccaaggacaacgacguggagcugugaggacuaguguccaccugucccuccugggcugcuggauugucucguuuuccugccaaauaaacaggaucagcgcuuuacagaucuaaaaaaaaaaaaaaaaaaaaaaaaaaaaaaaaaaaaaaaaaaaaaaaaaaaaaaaaaaaaaaaaugcaucccccccccccccccccccccccccccccccaaaggcucuuuucagagccaccagaauu

SEQ ID NO: 20307 - RNA, 1484 nt, Artificial Sequence
  mRNA product Design c-1 comprising derived and/or modified sequence from HRSV(Memphis-37)__AIY60635.1__N (opt5)
gggagaguccgcucagccagguugcagaagcggcuuagcguguguccuaaucuucucucugcguguagguaggccugugccgcaaacaagcuuaccauggcccugagcaaggugaaacucaacgacacccugaauaaggaucagcuucuguccucuagcaaauacacaauccaaagauccacgggcgacucuauugauacccccaacuaugacguccagaagcacaucaauaaacucugcgggaugcugcuuauuacagaggaugcuaaccauaaguucaccggaguuaucggcaugcuguacgccaugagccggcucgggcgcgaagacacaauuaagauccugagagaugcgggauaucacgugaaagcuaauggcguggacgucaccacacaucggcaggauaucaacgggaaggagaugaaauuugaagugcugacccucgccucccugacgaccgagauucagaucaauauugaaaucgagucucgcaagagcuacaaaaagaugcuuaaggagaugggagaaguugccccugaguauagacacgacuccccggauuguggcaugauuauccugugcauugcugcccucgugaucacaaaacuggcugccggcgaccggagcgggcuuaccgcggucauccgcagagccaacaaugugcugaagaacgaaaugaaacgguacaagggacuccugcccaaagauauugcuaauucuuucuaugagguuuuugagaaguacccucauuucaucgacguguuuguccacuucggcauugcccaauccagcacacgcgggggaucuagaguggaaggcaucuuugcugggcuguucaugaacgccuacggagcgggccaggugaugcuccgguggggcguccuggccaaauccguuaagaauauuaugcuugggcacgcuagcgugcaggccgagauggaacagguggucgagguguaugaauacgcucaaaagcugggaggcgaggccggguuuuaucauauccucaacaaucccaaagccucucugcuuucccugacccaguucccucacuuuagcuccguugugcucggaaacgcugcgggccuggggaucaugggagaguaccgcggcacgcccagaaaccaggaccuguaugaugccgcuaaggccuacgccgaacagcucaaagagaauggcgucauuaacuauucugugcuggaccuuacagcugaggaacuggaagccaucaagcaucaacucaauccuaaagauaacgacguugagcugugaggacuaguguccaccugucccuccugggcugcuggauugucucguuuuccugccaaauaaacaggaucagcgcuuuacagaucuaaaaaaaaaaaaaaaaaaaaaaaaaaaaaaaaaaaaaaaaaaaaaaaaaaaaaaaaaaaaaaaaugcaucccccccccccccccccccccccccccccccaaaggcucuuuucagagccaccagaauu

SEQ ID NO: 20308 - RNA, 1484 nt, Artificial Sequence
  mRNA product Design c-1 comprising derived and/or modified sequence from HRSV(Memphis-37)__AIY60635.1__N (opt6)
gggagaguccgcucagccagguugcagaagcggcuuagcguguguccuaaucuucucucugcguguagguaggccugugccgcaaacaagcuuaccauggccuuaaguaaaguaaaauuaaacgacacacuaaacaaagaccaauuacucucaucaucgaaauauacaauacaaagauccacaggagacuccauagauacaccaaauuacgacguacaaaaacauauaaacaaacucugcggaauguuauuaauaacagaagacgcaaaccacaaauucacaggagucauagguaugcuauacgcaaugucaagauuaggaagagaagauacaauaaaaauacuaagagacgcaggauaccacguaaaagcaaacggaguagacguaacaacacauagacaagauauaaacgguaaagaaaugaaauucgaaguacuaacacuagccagucuaacaacagaaauacaaauaaacauagaaauagaaagccgaaaaucauacaaaaaaauguuaaaagaaaugggggaaguagcacccgaauacagacaugauucaccugacugcggaaugauaauacucugcauagcggcauuagucauaacaaaacuagccgcaggagacagaagcggauuaacagcaguaauaagaagagcaaauaauguauuaaaaaaugaaaugaaaagguauaaaggauuacuaccaaaagauauagcaaacucauucuaugaaguuuucgaaaaauacccacacuucauagacgucuucguacacuuuggaauagcacaaagcagcacaagaggaggaagcagaguagaaggaauauucgcaggacuauucaugaaugcauacggagccggacaaguaaugcuaagauggggaguuuuagcaaaaagcguaaaaaacauaauguuaggacacgccuccguccaagccgaaauggaacaaguaguagaaguauacgaauaugcacaaaaacuaggaggagaagcaggauucuaucacauacucaauaacccaaaagcaucacuauugagcuuaacacaauucccacauuuuucauccguaguccuaggaaaugcagcaggcuuaggaauaaugggagaauacagaggcacaccaagaaaucaagacuuauacgaugcagcaaaagcauacgcagaacaacuaaaagaaaacggaguaauaaacuacucaguauuagauuuaacagcagaagaauuagaagcaauaaaacaucaacuaaauccuaaggauaaugauguagaacucuaaggacuaguguccaccugucccuccugggcugcuggauugucucguuuuccugccaaauaaacaggaucagcgcuuuacagaucuaaaaaaaaaaaaaaaaaaaaaaaaaaaaaaaaaaaaaaaaaaaaaaaaaaaaaaaaaaaaaaaaugcaucccccccccccccccccccccccccccccccaaaggcucuuuucagagccaccagaauu

SEQ ID NO: 20309 - RNA, 1484 nt, Artificial Sequence
  mRNA product Design c-1 comprising derived and/or modified sequence from HRSV(Memphis-37)__AIY60635.1__N (opt11)
gggagaguccgcucagccagguugcagaagcggcuuagcguguguccuaaucuucucucugcguguagguaggccugugccgcaaacaagcuuaccauggcccuaagcaaagucaaacucaacgacacacuaaacaaagaccaacuccucagcuccagcaaauacaccauccaacgauccaccggcgacuccauagacacccccaacuacgacguccaaaaacacaucaacaaacuaugcggcaugcuccuaaucacagaagacgccaaccacaaauucaccggagucaucggcaugcucuacgccaugagccgccucggccgagaagacacaaucaaaauacuaagagacgccggcuaccacguaaaagccaacggcguagacguaaccacccaccgccaagacaucaacggcaaagaaaugaaauucgaaguucucacccucgccucacuaaccacggaaauccaaauaaacauugaaaucgaaagcagaaaauccuacaaaaagaugcuaaaagaaaugggcgagguagccccagaauaccgccacgacagccccgacugcggaaugaucauccucugcauugcagcccucgucaucaccaaacuagccgccggcgacagaagcggccuaaccgcaguaauccgccgagccaacaacguacucaaaaacgaaaugaaacgcuacaaaggccuccuccccaaagacaucgccaacagcuucuacgaaguauucgaaaaauacccgcacuucaucgacgucuucguacacuucggcauagcccaaagcagcacacgaggcggcucccgcgucgaaggaauauucgccggccuguucaugaacgcauacggagcgggccaagucaugcuccgcugggguguacuagccaaguccgucaaaaacaucaugcuagggcacgcaagcguacaagccgaaauggaacaaguagucgaagucuacgaauacgcacaaaaacuaggcggcgaagccggcuucuaccacauccuaaacaaccccaaagccucauuacucucccucacccaauuuccucacuucuccagcgucguccucggaaacgccgccggccuaggcauaaugggggaauaccgcggcaccccgcgcaaccaagaccucuacgacgcagcaaaagccuacgcagaacaacuaaaagaaaacggagucaucaacuacagcguacuggaccuaaccgccgaagaacucgaagccauaaaacaccaacucaaccccaaagacaacgacgucgagcucuaaggacuaguguccaccugucccuccugggcugcuggauugucucguuuuccugccaaauaaacaggaucagcgcuuuacagaucuaaaaaaaaaaaaaaaaaaaaaaaaaaaaaaaaaaaaaaaaaaaaaaaaaaaaaaaaaaaaaaaaugcaucccccccccccccccccccccccccccccccaaaggcucuuuucagagccaccagaauu

SEQ ID NO: 20310 - RNA, 1574 nt, Artificial Sequence
  mRNA product Design c-2 comprising derived and/or modified sequence from HRSV(Memphis-37)__AIY60635.1__N (wt)
gggagacuccugucgggcggaaguaggaggaguagaguuuaaaaacaguacucuuuuuccgguucgggacguaguugaagcaacgacaagccggauaaccgcucuugagacaggaagcuuaccauggcucuuagcaaagucaaguugaacgauacacucaacaaagaucaacuucugucauccagcaaauacaccauccaacggagcacaggagauaguauugauacuccuaauuaugaugugcagaaacacaucaacaaguuauguggcauguuauuaaucacagaagaugcuaaucauaaauucacugggguaauagguauguuauaugcuaugucuagauuaggaagagaagacaccauaaaaauacucagagaugcgggauaucauguaaaagcaaauggaguggauguaacaacacaucgucaagacauuaauggaaaagaaaugaaauuugaaguguuaacauuggcaagcuuaacaacugaaauucaaaucaacauugagauagaaucuaggaaauccuacaaaaaaaugcuaaaagaaaugggagagguggcuccagaauacaggcaugacucuccugauuguggaaugauaauauuauguauagcagcauuaguaauaaccaaauuagcagcaggggauagaucuggucuuacugcugugauuaggagagcuaauaauguucuaaaaaaugaaaugaaacguuauaaaggcuuacuaccaaaggauauagccaacagcuucuaugaaguguuugaaaaauauccucacuuuauagauguuuuuguucauuuugguauagcacaaucuucuaccagagguggcaguagaguugaagggauuuuugcaggauuguuuaugaaugccuauggugcagggcaagugauguuacgguggggagucuuagcaaaaucaguuaaaaauauuaugcuaggacaugcuagugugcaagcagaaauggaacaaguuguggaaguuuaugaauaugcccaaaaauuggguggagaagcaggauucuaccauauauugaacaauccaaaagcaucauuauuaucuuugacucaauuuccccacuucuccaguguaguauugggcaaugcugcuggccuaggcauaaugggagaauacagagguacaccaaggaaucaagaucuauaugaugcugcaaaggcauaugcugaacaacucaaagaaaauggugugauuaacuacaguguauuagacuugacagcagaagaacuagaggcuaucaaacaucagcuuaauccaaaagauaaugauguagagcuuugaggacuaguggaagcauuuuccuggcugauuaaaagaaauuacucagcuauggucaucuguuccuguuagaaggcuaugcagcauauuauauacuaugcgcauguuaugaaaugcauaauaaaaaauuuuaaaaaaucuaaaagaucuaaaaaaaaaaaaaaaaaaaaaaaaaaaaaaaaaaaaaaaaaaaaaaaaaaaaaaaaaaaaaaaaugcaucccccccccccccccccccccccccccccccaaaggcucuuuucagagccaccagaauu

SEQ ID NO: 20311 - RNA, 1574 nt, Artificial Sequence
  mRNA product Design c-2 comprising derived and/or modified sequence from HRSV(Memphis-37)__AIY60635.1__N (opt1)
gggagacuccugucgggcggaaguaggaggaguagaguuuaaaaacaguacucuuuuuccgguucgggacguaguugaagcaacgacaagccggauaaccgcucuugagacaggaagcuuaccauggcccugagcaaggugaagcucaacgacacccugaacaaggaccagcugcucuccagcuccaaguacaccauccagcgcagcaccggcgacuccaucgacacccccaacuacgacguccagaagcacaucaacaagcugugcgggaugcugcucaucaccgaggacgccaaccacaaguucaccggcgugaucgggaugcuguacgcgaugagccggcugggccgcgaggacacgaucaagauccuccgggacgccggguaccacgugaaggccaacggcgucgacgugaccacccaccgccaggacaucaacggcaaggagaugaaguucgaggugcugacccuggccucccucacgaccgagauccagaucaacaucgagaucgagagccggaaguccuacaagaagaugcugaaggagaugggggaggucgccccggaguaccgccacgacagccccgacugcggcaugaucauccugugcaucgcggcccucgugaucaccaagcuggccgccggggaccgguccggccugaccgcggugauccgccgggccaacaacguccucaagaacgagaugaagcgcuacaaggggcugcugcccaaggacaucgccaacagcuucuacgagguguucgagaaguacccccacuucaucgacguguucguccacuucggcaucgcccaguccagcacgcggggcgggucccgcguggagggcaucuucgccgggcuguucaugaacgcguacggcgccggccaggugaugcugcgguggggcguccuggccaagagcgugaagaacaucaugcucgggcacgccuccgugcaggccgagauggagcaggucguggagguguacgaguacgcgcagaagcucgggggcgaggccggguucuaccacauccugaacaacccgaaggccagccuccugucccugacccaguucccccacuucagcagcgucgugcucggcaacgccgccggccuggggaucaugggcgaguaccgcgggacgccccggaaccaggaccuguacgacgcggccaaggccuacgccgagcagcucaaggagaacggcgugaucaacuacuccguccuggaccugaccgccgaggagcucgaggcgaucaagcaccagcugaaccccaaggacaacgacguggagcugugaggacuaguggaagcauuuuccuggcugauuaaaagaaauuacucagcuauggucaucuguuccuguuagaaggcuaugcagcauauuauauacuaugcgcauguuaugaaaugcauaauaaaaaauuuuaaaaaaucuaaaagaucuaaaaaaaaaaaaaaaaaaaaaaaaaaaaaaaaaaaaaaaaaaaaaaaaaaaaaaaaaaaaaaaaugcaucccccccccccccccccccccccccccccccaaaggcucuuuucagagccaccagaauu

SEQ ID NO: 20312 - RNA, 1574 nt, Artificial Sequence
  mRNA product Design c-2 comprising derived and/or modified sequence from HRSV(Memphis-37)__AIY60635.1__N (opt2)
gggagacuccugucgggcggaaguaggaggaguagaguuuaaaaacaguacucuuuuuccgguucgggacguaguugaagcaacgacaagccggauaaccgcucuugagacaggaagcuuaccauggcccucuccaaggucaagcucaacgacacccucaacaaggaccagcuccucuccuccuccaaguacaccauccagcgcuccaccggcgacuccaucgacacccccaacuacgacguccagaagcacaucaacaagcucugcggcaugcuccucaucaccgaggacgccaaccacaaguucaccggcgucaucggcaugcucuacgccaugucccgccucggccgcgaggacaccaucaagauccuccgcgacgccggcuaccacgucaaggccaacggcgucgacgucaccacccaccgccaggacaucaacggcaaggagaugaaguucgagguccucacccucgccucccucaccaccgagauccagaucaacaucgagaucgagucccgcaaguccuacaagaagaugcucaaggagaugggcgaggucgcccccgaguaccgccacgacucccccgacugcggcaugaucauccucugcaucgccgcccucgucaucaccaagcucgccgccggcgaccgcuccggccucaccgccgucauccgccgcgccaacaacguccucaagaacgagaugaagcgcuacaagggccuccuccccaaggacaucgccaacuccuucuacgaggucuucgagaaguacccccacuucaucgacgucuucguccacuucggcaucgcccaguccuccacccgcggcggcucccgcgucgagggcaucuucgccggccucuucaugaacgccuacggcgccggccaggucaugcuccgcuggggcguccucgccaaguccgucaagaacaucaugcucggccacgccuccguccaggccgagauggagcaggucgucgaggucuacgaguacgcccagaagcucggcggcgaggccggcuucuaccacauccucaacaaccccaaggccucccuccucucccucacccaguucccccacuucuccuccgucguccucggcaacgccgccggccucggcaucaugggcgaguaccgcggcaccccccgcaaccaggaccucuacgacgccgccaaggccuacgccgagcagcucaaggagaacggcgucaucaacuacuccguccucgaccucaccgccgaggagcucgaggccaucaagcaccagcucaaccccaaggacaacgacgucgagcucugaggacuaguggaagcauuuuccuggcugauuaaaagaaauuacucagcuauggucaucuguuccuguuagaaggcuaugcagcauauuauauacuaugcgcauguuaugaaaugcauaauaaaaaauuuuaaaaaaucuaaaagaucuaaaaaaaaaaaaaaaaaaaaaaaaaaaaaaaaaaaaaaaaaaaaaaaaaaaaaaaaaaaaaaaaugcaucccccccccccccccccccccccccccccccaaaggcucuuuucagagccaccagaauu

SEQ ID NO: 20313 - RNA, 1574 nt, Artificial Sequence
  mRNA product Design c-2 comprising derived and/or modified sequence from HRSV(Memphis-37)__AIY60635.1__N (opt3)
gggagacuccugucgggcggaaguaggaggaguagaguuuaaaaacaguacucuuuuuccgguucgggacguaguugaagcaacgacaagccggauaaccgcucuugagacaggaagcuuaccauggcccugagcaaggugaaacucaacgacacccuuaauaaggaucagcuguuguccucuucaaaauacacaauccaaagaaguacuggcgacagcauugauacgcccaacuaugacguccagaagcacauaaauaaauuaugcgggaugcugcuaaucaccgaggaugcuaaccauaaguucacaggaguuauugguaugcucuacgcaauguccaggcugggccgggaagacacuaucaagauucuucgcgaugccggguaucacgugaaagcgaauggaguagacgugaccacacaucgacaggauaucaacggcaaggagaugaaauuugaaguccugaccuuggcuucucucacuacagagauacagaucaauauugaaaucgagucgcguaagucauacaaaaagaugcugaaggagaugggugaaguggccccugaguauagacacgacagcccagauugugggaugauuauccugugcauagcagcccucguuauuaccaaauuagcugcaggagacaggaguggccugacggccgugauccggcgcgcuaacaauguccuuaagaacgaaaugaaaagauacaagggcuugcugccgaaagauauugccaauuccuucuaugagguguuugagaaguacccccauuucaucgacguauuuguucacuucgggaucgcgcaaucuagcacuaggggagguucccggguggaaggcauuuuugcagggcuauucaugaacgccuacggagcuggccaggucaugcuccgcuggggugugcuggccaaaucagugaagaauauaaugcuugggcacgcaaguguccaggcugagauggaacagguuguggagguauaugaauacgcccaaaagcugggaggcgaggcgggcuuuuaucauaucuugaacaauccuaaagccagccuccugucuuuaacccaguucccacacuuuuccucagugguccuggggaacgcagcuggacucgguauuaugggcgaguaccgagggacacccagaaaccaggaccuuuaugaugccgcuaaggccuacgcagaacagcugaaagagaauggagugaucaacuauagcguuuuggaccuaacugccgaggaacuggaagcuauaaagcaucaacucaauccuaaagauaacgacguggagcugugaggacuaguggaagcauuuuccuggcugauuaaaagaaauuacucagcuauggucaucuguuccuguuagaaggcuaugcagcauauuauauacuaugcgcauguuaugaaaugcauaauaaaaaauuuuaaaaaaucuaaaagaucuaaaaaaaaaaaaaaaaaaaaaaaaaaaaaaaaaaaaaaaaaaaaaaaaaaaaaaaaaaaaaaaaugcaucccccccccccccccccccccccccccccccaaaggcucuuuucagagccaccagaauu

SEQ ID NO: 20314 - RNA, 1574 nt, Artificial Sequence
  mRNA product Design c-2 comprising derived and/or modified sequence from HRSV(Memphis-37)__AIY60635.1__N (opt4)
gggagacuccugucgggcggaaguaggaggaguagaguuuaaaaacaguacucuuuuuccgguucgggacguaguugaagcaacgacaagccggauaaccgcucuugagacaggaagcuuaccauggcccugagcaaggugaagcugaacgacacccugaacaaggaccagcugcugagcagcagcaaguacaccauccagagaagcaccggcgacagcaucgacacccccaacuacgacgugcagaagcacaucaacaagcugugcggcaugcugcugaucaccgaggacgccaaccacaaguucaccggcgugaucggcaugcuguacgccaugagcagacugggcagagaggacaccaucaagauccugagagacgccggcuaccacgugaaggccaacggcguggacgugaccacccacagacaggacaucaacggcaaggagaugaaguucgaggugcugacccuggccagccugaccaccgagauccagaucaacaucgagaucgagagcagaaagagcuacaagaagaugcugaaggagaugggcgagguggcccccgaguacagacacgacagccccgacugcggcaugaucauccugugcaucgccgcccuggugaucaccaagcuggccgccggcgacagaagcggccugaccgccgugaucagaagagccaacaacgugcugaagaacgagaugaagagauacaagggccugcugcccaaggacaucgccaacagcuucuacgagguguucgagaaguacccccacuucaucgacguguucgugcacuucggcaucgcccagagcagcaccagaggcggcagcagaguggagggcaucuucgccggccuguucaugaacgccuacggcgccggccaggugaugcugagauggggcgugcuggccaagagcgugaagaacaucaugcugggccacgccagcgugcaggccgagauggagcaggugguggagguguacgaguacgcccagaagcugggcggcgaggccggcuucuaccacauccugaacaaccccaaggccagccugcugagccugacccaguucccccacuucagcagcguggugcugggcaacgccgccggccugggcaucaugggcgaguacagaggcacccccagaaaccaggaccuguacgacgccgccaaggccuacgccgagcagcugaaggagaacggcgugaucaacuacagcgugcuggaccugaccgccgaggagcuggaggccaucaagcaccagcugaaccccaaggacaacgacguggagcugugaggacuaguggaagcauuuuccuggcugauuaaaagaaauuacucagcuauggucaucuguuccuguuagaaggcuaugcagcauauuauauacuaugcgcauguuaugaaaugcauaauaaaaaauuuuaaaaaaucuaaaagaucuaaaaaaaaaaaaaaaaaaaaaaaaaaaaaaaaaaaaaaaaaaaaaaaaaaaaaaaaaaaaaaaaugcaucccccccccccccccccccccccccccccccaaaggcucuuuucagagccaccagaauu

SEQ ID NO: 20315 - RNA, 1574 nt, Artificial Sequence
  mRNA product Design c-2 comprising derived and/or modified sequence from HRSV(Memphis-37)__AIY60635.1__N (opt5)
gggagacuccugucgggcggaaguaggaggaguagaguuuaaaaacaguacucuuuuuccgguucgggacguaguugaagcaacgacaagccggauaaccgcucuugagacaggaagcuuaccauggcccugagcaaggugaaacucaacgacacccugaauaaggaucagcuucuguccucuagcaaauacacaauccaaagauccacgggcgacucuauugauacccccaacuaugacguccagaagcacaucaauaaacucugcgggaugcugcuuauuacagaggaugcuaaccauaaguucaccggaguuaucggcaugcuguacgccaugagccggcucgggcgcgaagacacaauuaagauccugagagaugcgggauaucacgugaaagcuaauggcguggacgucaccacacaucggcaggauaucaacgggaaggagaugaaauuugaagugcugacccucgccucccugacgaccgagauucagaucaauauugaaaucgagucucgcaagagcuacaaaaagaugcuuaaggagaugggagaaguugccccugaguauagacacgacuccccggauuguggcaugauuauccugugcauugcugcccucgugaucacaaaacuggcugccggcgaccggagcgggcuuaccgcggucauccgcagagccaacaaugugcugaagaacgaaaugaaacgguacaagggacuccugcccaaagauauugcuaauucuuucuaugagguuuuugagaaguacccucauuucaucgacguguuuguccacuucggcauugcccaauccagcacacgcgggggaucuagaguggaaggcaucuuugcugggcuguucaugaacgccuacggagcgggccaggugaugcuccgguggggcguccuggccaaauccguuaagaauauuaugcuugggcacgcuagcgugcaggccgagauggaacagguggucgagguguaugaauacgcucaaaagcugggaggcgaggccggguuuuaucauauccucaacaaucccaaagccucucugcuuucccugacccaguucccucacuuuagcuccguugugcucggaaacgcugcgggccuggggaucaugggagaguaccgcggcacgcccagaaaccaggaccuguaugaugccgcuaaggccuacgccgaacagcucaaagagaauggcgucauuaacuauucugugcuggaccuuacagcugaggaacuggaagccaucaagcaucaacucaauccuaaagauaacgacguugagcugugaggacuaguggaagcauuuuccuggcugauuaaaagaaauuacucagcuauggucaucuguuccuguuagaaggcuaugcagcauauuauauacuaugcgcauguuaugaaaugcauaauaaaaaauuuuaaaaaaucuaaaagaucuaaaaaaaaaaaaaaaaaaaaaaaaaaaaaaaaaaaaaaaaaaaaaaaaaaaaaaaaaaaaaaaaugcaucccccccccccccccccccccccccccccccaaaggcucuuuucagagccaccagaauu

SEQ ID NO: 20316 - RNA, 1574 nt, Artificial Sequence
  mRNA product Design c-2 comprising derived and/or modified sequence from HRSV(Memphis-37)__AIY60635.1__N (opt6)
gggagacuccugucgggcggaaguaggaggaguagaguuuaaaaacaguacucuuuuuccgguucgggacguaguugaagcaacgacaagccggauaaccgcucuugagacaggaagcuuaccauggccuuaaguaaaguaaaauuaaacgacacacuaaacaaagaccaauuacucucaucaucgaaauauacaauacaaagauccacaggagacuccauagauacaccaaauuacgacguacaaaaacauauaaacaaacucugcggaauguuauuaauaacagaagacgcaaaccacaaauucacaggagucauagguaugcuauacgcaaugucaagauuaggaagagaagauacaauaaaaauacuaagagacgcaggauaccacguaaaagcaaacggaguagacguaacaacacauagacaagauauaaacgguaaagaaaugaaauucgaaguacuaacacuagccagucuaacaacagaaauacaaauaaacauagaaauagaaagccgaaaaucauacaaaaaaauguuaaaagaaaugggggaaguagcacccgaauacagacaugauucaccugacugcggaaugauaauacucugcauagcggcauuagucauaacaaaacuagccgcaggagacagaagcggauuaacagcaguaauaagaagagcaaauaauguauuaaaaaaugaaaugaaaagguauaaaggauuacuaccaaaagauauagcaaacucauucuaugaaguuuucgaaaaauacccacacuucauagacgucuucguacacuuuggaauagcacaaagcagcacaagaggaggaagcagaguagaaggaauauucgcaggacuauucaugaaugcauacggagccggacaaguaaugcuaagauggggaguuuuagcaaaaagcguaaaaaacauaauguuaggacacgccuccguccaagccgaaauggaacaaguaguagaaguauacgaauaugcacaaaaacuaggaggagaagcaggauucuaucacauacucaauaacccaaaagcaucacuauugagcuuaacacaauucccacauuuuucauccguaguccuaggaaaugcagcaggcuuaggaauaaugggagaauacagaggcacaccaagaaaucaagacuuauacgaugcagcaaaagcauacgcagaacaacuaaaagaaaacggaguaauaaacuacucaguauuagauuuaacagcagaagaauuagaagcaauaaaacaucaacuaaauccuaaggauaaugauguagaacucuaaggacuaguggaagcauuuuccuggcugauuaaaagaaauuacucagcuauggucaucuguuccuguuagaaggcuaugcagcauauuauauacuaugcgcauguuaugaaaugcauaauaaaaaauuuuaaaaaaucuaaaagaucuaaaaaaaaaaaaaaaaaaaaaaaaaaaaaaaaaaaaaaaaaaaaaaaaaaaaaaaaaaaaaaaaugcaucccccccccccccccccccccccccccccccaaaggcucuuuucagagccaccagaauu

SEQ ID NO: 20317 - RNA, 1574 nt, Artificial Sequence
  mRNA product Design c-2 comprising derived and/or modified sequence from HRSV(Memphis-37)__AIY60635.1__N (opt11)
gggagacuccugucgggcggaaguaggaggaguagaguuuaaaaacaguacucuuuuuccgguucgggacguaguugaagcaacgacaagccggauaaccgcucuugagacaggaagcuuaccauggcccuaagcaaagucaaacucaacgacacacuaaacaaagaccaacuccucagcuccagcaaauacaccauccaacgauccaccggcgacuccauagacacccccaacuacgacguccaaaaacacaucaacaaacuaugcggcaugcuccuaaucacagaagacgccaaccacaaauucaccggagucaucggcaugcucuacgccaugagccgccucggccgagaagacacaaucaaaauacuaagagacgccggcuaccacguaaaagccaacggcguagacguaaccacccaccgccaagacaucaacggcaaagaaaugaaauucgaaguucucacccucgccucacuaaccacggaaauccaaauaaacauugaaaucgaaagcagaaaauccuacaaaaagaugcuaaaagaaaugggcgagguagccccagaauaccgccacgacagccccgacugcggaaugaucauccucugcauugcagcccucgucaucaccaaacuagccgccggcgacagaagcggccuaaccgcaguaauccgccgagccaacaacguacucaaaaacgaaaugaaacgcuacaaaggccuccuccccaaagacaucgccaacagcuucuacgaaguauucgaaaaauacccgcacuucaucgacgucuucguacacuucggcauagcccaaagcagcacacgaggcggcucccgcgucgaaggaauauucgccggccuguucaugaacgcauacggagcgggccaagucaugcuccgcugggguguacuagccaaguccgucaaaaacaucaugcuagggcacgcaagcguacaagccgaaauggaacaaguagucgaagucuacgaauacgcacaaaaacuaggcggcgaagccggcuucuaccacauccuaaacaaccccaaagccucauuacucucccucacccaauuuccucacuucuccagcgucguccucggaaacgccgccggccuaggcauaaugggggaauaccgcggcaccccgcgcaaccaagaccucuacgacgcagcaaaagccuacgcagaacaacuaaaagaaaacggagucaucaacuacagcguacuggaccuaaccgccgaagaacucgaagccauaaaacaccaacucaaccccaaagacaacgacgucgagcucuaaggacuaguggaagcauuuuccuggcugauuaaaagaaauuacucagcuauggucaucuguuccuguuagaaggcuaugcagcauauuauauacuaugcgcauguuaugaaaugcauaauaaaaaauuuuaaaaaaucuaaaagaucuaaaaaaaaaaaaaaaaaaaaaaaaaaaaaaaaaaaaaaaaaaaaaaaaaaaaaaaaaaaaaaaaugcaucccccccccccccccccccccccccccccccaaaggcucuuuucagagccaccagaauu

SEQ ID NO: 20318 - RNA, 1551 nt, Artificial Sequence
  mRNA product Design c-3 comprising derived and/or modified sequence from HRSV(Memphis-37)__AIY60635.1__N (wt)
gggagaguccgcucagccagguugcagaagcggcuuagcguguguccuaaucuucucucugcguguagguaggccugugccgcaaacaagcuuaccauggcucuuagcaaagucaaguugaacgauacacucaacaaagaucaacuucugucauccagcaaauacaccauccaacggagcacaggagauaguauugauacuccuaauuaugaugugcagaaacacaucaacaaguuauguggcauguuauuaaucacagaagaugcuaaucauaaauucacugggguaauagguauguuauaugcuaugucuagauuaggaagagaagacaccauaaaaauacucagagaugcgggauaucauguaaaagcaaauggaguggauguaacaacacaucgucaagacauuaauggaaaagaaaugaaauuugaaguguuaacauuggcaagcuuaacaacugaaauucaaaucaacauugagauagaaucuaggaaauccuacaaaaaaaugcuaaaagaaaugggagagguggcuccagaauacaggcaugacucuccugauuguggaaugauaauauuauguauagcagcauuaguaauaaccaaauuagcagcaggggauagaucuggucuuacugcugugauuaggagagcuaauaauguucuaaaaaaugaaaugaaacguuauaaaggcuuacuaccaaaggauauagccaacagcuucuaugaaguguuugaaaaauauccucacuuuauagauguuuuuguucauuuugguauagcacaaucuucuaccagagguggcaguagaguugaagggauuuuugcaggauuguuuaugaaugccuauggugcagggcaagugauguuacgguggggagucuuagcaaaaucaguuaaaaauauuaugcuaggacaugcuagugugcaagcagaaauggaacaaguuguggaaguuuaugaauaugcccaaaaauuggguggagaagcaggauucuaccauauauugaacaauccaaaagcaucauuauuaucuuugacucaauuuccccacuucuccaguguaguauugggcaaugcugcuggccuaggcauaaugggagaauacagagguacaccaaggaaucaagaucuauaugaugcugcaaaggcauaugcugaacaacucaaagaaaauggugugauuaacuacaguguauuagacuugacagcagaagaacuagaggcuaucaaacaucagcuuaauccaaaagauaaugauguagagcuuugaggacuaguacuggcugcaucucccuuuccucuguccuccauccuucucccaggauggugaagggggaccugguacccagugauccccaccccaggauccuaaaucaugacuuaccugcuaauaaaaacucauuggaaaagugagaagaucuaaaaaaaaaaaaaaaaaaaaaaaaaaaaaaaaaaaaaaaaaaaaaaaaaaaaaaaaaaaaaaaaugcaucccccccccccccccccccccccccccccccaaaggcucuuuucagagccaccagaauu

SEQ ID NO: 20319 - RNA, 1551 nt, Artificial Sequence
  mRNA product Design c-3 comprising derived and/or modified sequence from HRSV(Memphis-37)__AIY60635.1__N (opt1)
gggagaguccgcucagccagguugcagaagcggcuuagcguguguccuaaucuucucucugcguguagguaggccugugccgcaaacaagcuuaccauggcccugagcaaggugaagcucaacgacacccugaacaaggaccagcugcucuccagcuccaaguacaccauccagcgcagcaccggcgacuccaucgacacccccaacuacgacguccagaagcacaucaacaagcugugcgggaugcugcucaucaccgaggacgccaaccacaaguucaccggcgugaucgggaugcuguacgcgaugagccggcugggccgcgaggacacgaucaagauccuccgggacgccggguaccacgugaaggccaacggcgucgacgugaccacccaccgccaggacaucaacggcaaggagaugaaguucgaggugcugacccuggccucccucacgaccgagauccagaucaacaucgagaucgagagccggaaguccuacaagaagaugcugaaggagaugggggaggucgccccggaguaccgccacgacagccccgacugcggcaugaucauccugugcaucgcggcccucgugaucaccaagcuggccgccggggaccgguccggccugaccgcggugauccgccgggccaacaacguccucaagaacgagaugaagcgcuacaaggggcugcugcccaaggacaucgccaacagcuucuacgagguguucgagaaguacccccacuucaucgacguguucguccacuucggcaucgcccaguccagcacgcggggcgggucccgcguggagggcaucuucgccgggcuguucaugaacgcguacggcgccggccaggugaugcugcgguggggcguccuggccaagagcgugaagaacaucaugcucgggcacgccuccgugcaggccgagauggagcaggucguggagguguacgaguacgcgcagaagcucgggggcgaggccggguucuaccacauccugaacaacccgaaggccagccuccugucccugacccaguucccccacuucagcagcgucgugcucggcaacgccgccggccuggggaucaugggcgaguaccgcgggacgccccggaaccaggaccuguacgacgcggccaaggccuacgccgagcagcucaaggagaacggcgugaucaacuacuccguccuggaccugaccgccgaggagcucgaggcgaucaagcaccagcugaaccccaaggacaacgacguggagcugugaggacuaguacuggcugcaucucccuuuccucuguccuccauccuucucccaggauggugaagggggaccugguacccagugauccccaccccaggauccuaaaucaugacuuaccugcuaauaaaaacucauuggaaaagugagaagaucuaaaaaaaaaaaaaaaaaaaaaaaaaaaaaaaaaaaaaaaaaaaaaaaaaaaaaaaaaaaaaaaaugcaucccccccccccccccccccccccccccccccaaaggcucuuuucagagccaccagaauu

SEQ ID NO: 20320 - RNA, 1551 nt, Artificial Sequence
  mRNA product Design c-3 comprising derived and/or modified sequence from HRSV(Memphis-37)__AIY60635.1__N (opt2)
gggagaguccgcucagccagguugcagaagcggcuuagcguguguccuaaucuucucucugcguguagguaggccugugccgcaaacaagcuuaccauggcccucuccaaggucaagcucaacgacacccucaacaaggaccagcuccucuccuccuccaaguacaccauccagcgcuccaccggcgacuccaucgacacccccaacuacgacguccagaagcacaucaacaagcucugcggcaugcuccucaucaccgaggacgccaaccacaaguucaccggcgucaucggcaugcucuacgccaugucccgccucggccgcgaggacaccaucaagauccuccgcgacgccggcuaccacgucaaggccaacggcgucgacgucaccacccaccgccaggacaucaacggcaaggagaugaaguucgagguccucacccucgccucccucaccaccgagauccagaucaacaucgagaucgagucccgcaaguccuacaagaagaugcucaaggagaugggcgaggucgcccccgaguaccgccacgacucccccgacugcggcaugaucauccucugcaucgccgcccucgucaucaccaagcucgccgccggcgaccgcuccggccucaccgccgucauccgccgcgccaacaacguccucaagaacgagaugaagcgcuacaagggccuccuccccaaggacaucgccaacuccuucuacgaggucuucgagaaguacccccacuucaucgacgucuucguccacuucggcaucgcccaguccuccacccgcggcggcucccgcgucgagggcaucuucgccggccucuucaugaacgccuacggcgccggccaggucaugcuccgcuggggcguccucgccaaguccgucaagaacaucaugcucggccacgccuccguccaggccgagauggagcaggucgucgaggucuacgaguacgcccagaagcucggcggcgaggccggcuucuaccacauccucaacaaccccaaggccucccuccucucccucacccaguucccccacuucuccuccgucguccucggcaacgccgccggccucggcaucaugggcgaguaccgcggcaccccccgcaaccaggaccucuacgacgccgccaaggccuacgccgagcagcucaaggagaacggcgucaucaacuacuccguccucgaccucaccgccgaggagcucgaggccaucaagcaccagcucaaccccaaggacaacgacgucgagcucugaggacuaguacuggcugcaucucccuuuccucuguccuccauccuucucccaggauggugaagggggaccugguacccagugauccccaccccaggauccuaaaucaugacuuaccugcuaauaaaaacucauuggaaaagugagaagaucuaaaaaaaaaaaaaaaaaaaaaaaaaaaaaaaaaaaaaaaaaaaaaaaaaaaaaaaaaaaaaaaaugcaucccccccccccccccccccccccccccccccaaaggcucuuuucagagccaccagaauu

SEQ ID NO: 20321 - RNA, 1551 nt, Artificial Sequence
  mRNA product Design c-3 comprising derived and/or modified sequence from HRSV(Memphis-37)__AIY60635.1__N (opt3)
gggagaguccgcucagccagguugcagaagcggcuuagcguguguccuaaucuucucucugcguguagguaggccugugccgcaaacaagcuuaccauggcccugagcaaggugaaacucaacgacacccuuaauaaggaucagcuguuguccucuucaaaauacacaauccaaagaaguacuggcgacagcauugauacgcccaacuaugacguccagaagcacauaaauaaauuaugcgggaugcugcuaaucaccgaggaugcuaaccauaaguucacaggaguuauugguaugcucuacgcaauguccaggcugggccgggaagacacuaucaagauucuucgcgaugccggguaucacgugaaagcgaauggaguagacgugaccacacaucgacaggauaucaacggcaaggagaugaaauuugaaguccugaccuuggcuucucucacuacagagauacagaucaauauugaaaucgagucgcguaagucauacaaaaagaugcugaaggagaugggugaaguggccccugaguauagacacgacagcccagauugugggaugauuauccugugcauagcagcccucguuauuaccaaauuagcugcaggagacaggaguggccugacggccgugauccggcgcgcuaacaauguccuuaagaacgaaaugaaaagauacaagggcuugcugccgaaagauauugccaauuccuucuaugagguguuugagaaguacccccauuucaucgacguauuuguucacuucgggaucgcgcaaucuagcacuaggggagguucccggguggaaggcauuuuugcagggcuauucaugaacgccuacggagcuggccaggucaugcuccgcuggggugugcuggccaaaucagugaagaauauaaugcuugggcacgcaaguguccaggcugagauggaacagguuguggagguauaugaauacgcccaaaagcugggaggcgaggcgggcuuuuaucauaucuugaacaauccuaaagccagccuccugucuuuaacccaguucccacacuuuuccucagugguccuggggaacgcagcuggacucgguauuaugggcgaguaccgagggacacccagaaaccaggaccuuuaugaugccgcuaaggccuacgcagaacagcugaaagagaauggagugaucaacuauagcguuuuggaccuaacugccgaggaacuggaagcuauaaagcaucaacucaauccuaaagauaacgacguggagcugugaggacuaguacuggcugcaucucccuuuccucuguccuccauccuucucccaggauggugaagggggaccugguacccagugauccccaccccaggauccuaaaucaugacuuaccugcuaauaaaaacucauuggaaaagugagaagaucuaaaaaaaaaaaaaaaaaaaaaaaaaaaaaaaaaaaaaaaaaaaaaaaaaaaaaaaaaaaaaaaaugcaucccccccccccccccccccccccccccccccaaaggcucuuuucagagccaccagaauu

SEQ ID NO: 20322 - RNA, 1551 nt, Artificial Sequence
  mRNA product Design c-3 comprising derived and/or modified sequence from HRSV(Memphis-37)__AIY60635.1__N (opt4)
gggagaguccgcucagccagguugcagaagcggcuuagcguguguccuaaucuucucucugcguguagguaggccugugccgcaaacaagcuuaccauggcccugagcaaggugaagcugaacgacacccugaacaaggaccagcugcugagcagcagcaaguacaccauccagagaagcaccggcgacagcaucgacacccccaacuacgacgugcagaagcacaucaacaagcugugcggcaugcugcugaucaccgaggacgccaaccacaaguucaccggcgugaucggcaugcuguacgccaugagcagacugggcagagaggacaccaucaagauccugagagacgccggcuaccacgugaaggccaacggcguggacgugaccacccacagacaggacaucaacggcaaggagaugaaguucgaggugcugacccuggccagccugaccaccgagauccagaucaacaucgagaucgagagcagaaagagcuacaagaagaugcugaaggagaugggcgagguggcccccgaguacagacacgacagccccgacugcggcaugaucauccugugcaucgccgcccuggugaucaccaagcuggccgccggcgacagaagcggccugaccgccgugaucagaagagccaacaacgugcugaagaacgagaugaagagauacaagggccugcugcccaaggacaucgccaacagcuucuacgagguguucgagaaguacccccacuucaucgacguguucgugcacuucggcaucgcccagagcagcaccagaggcggcagcagaguggagggcaucuucgccggccuguucaugaacgccuacggcgccggccaggugaugcugagauggggcgugcuggccaagagcgugaagaacaucaugcugggccacgccagcgugcaggccgagauggagcaggugguggagguguacgaguacgcccagaagcugggcggcgaggccggcuucuaccacauccugaacaaccccaaggccagccugcugagccugacccaguucccccacuucagcagcguggugcugggcaacgccgccggccugggcaucaugggcgaguacagaggcacccccagaaaccaggaccuguacgacgccgccaaggccuacgccgagcagcugaaggagaacggcgugaucaacuacagcgugcuggaccugaccgccgaggagcuggaggccaucaagcaccagcugaaccccaaggacaacgacguggagcugugaggacuaguacuggcugcaucucccuuuccucuguccuccauccuucucccaggauggugaagggggaccugguacccagugauccccaccccaggauccuaaaucaugacuuaccugcuaauaaaaacucauuggaaaagugagaagaucuaaaaaaaaaaaaaaaaaaaaaaaaaaaaaaaaaaaaaaaaaaaaaaaaaaaaaaaaaaaaaaaaugcaucccccccccccccccccccccccccccccccaaaggcucuuuucagagccaccagaauu

SEQ ID NO: 20323 - RNA, 1551 nt, Artificial Sequence
  mRNA product Design c-3 comprising derived and/or modified sequence from HRSV(Memphis-37)__AIY60635.1__N (opt5)
gggagaguccgcucagccagguugcagaagcggcuuagcguguguccuaaucuucucucugcguguagguaggccugugccgcaaacaagcuuaccauggcccugagcaaggugaaacucaacgacacccugaauaaggaucagcuucuguccucuagcaaauacacaauccaaagauccacgggcgacucuauugauacccccaacuaugacguccagaagcacaucaauaaacucugcgggaugcugcuuauuacagaggaugcuaaccauaaguucaccggaguuaucggcaugcuguacgccaugagccggcucgggcgcgaagacacaauuaagauccugagagaugcgggauaucacgugaaagcuaauggcguggacgucaccacacaucggcaggauaucaacgggaaggagaugaaauuugaagugcugacccucgccucccugacgaccgagauucagaucaauauugaaaucgagucucgcaagagcuacaaaaagaugcuuaaggagaugggagaaguugccccugaguauagacacgacuccccggauuguggcaugauuauccugugcauugcugcccucgugaucacaaaacuggcugccggcgaccggagcgggcuuaccgcggucauccgcagagccaacaaugugcugaagaacgaaaugaaacgguacaagggacuccugcccaaagauauugcuaauucuuucuaugagguuuuugagaaguacccucauuucaucgacguguuuguccacuucggcauugcccaauccagcacacgcgggggaucuagaguggaaggcaucuuugcugggcuguucaugaacgccuacggagcgggccaggugaugcuccgguggggcguccuggccaaauccguuaagaauauuaugcuugggcacgcuagcgugcaggccgagauggaacagguggucgagguguaugaauacgcucaaaagcugggaggcgaggccggguuuuaucauauccucaacaaucccaaagccucucugcuuucccugacccaguucccucacuuuagcuccguugugcucggaaacgcugcgggccuggggaucaugggagaguaccgcggcacgcccagaaaccaggaccuguaugaugccgcuaaggccuacgccgaacagcucaaagagaauggcgucauuaacuauucugugcuggaccuuacagcugaggaacuggaagccaucaagcaucaacucaauccuaaagauaacgacguugagcugugaggacuaguacuggcugcaucucccuuuccucuguccuccauccuucucccaggauggugaagggggaccugguacccagugauccccaccccaggauccuaaaucaugacuuaccugcuaauaaaaacucauuggaaaagugagaagaucuaaaaaaaaaaaaaaaaaaaaaaaaaaaaaaaaaaaaaaaaaaaaaaaaaaaaaaaaaaaaaaaaugcaucccccccccccccccccccccccccccccccaaaggcucuuuucagagccaccagaauu

SEQ ID NO: 20324 - RNA, 1551 nt, Artificial Sequence
  mRNA product Design c-3 comprising derived and/or modified sequence from HRSV(Memphis-37)__AIY60635.1__N (opt6)
gggagaguccgcucagccagguugcagaagcggcuuagcguguguccuaaucuucucucugcguguagguaggccugugccgcaaacaagcuuaccauggccuuaaguaaaguaaaauuaaacgacacacuaaacaaagaccaauuacucucaucaucgaaauauacaauacaaagauccacaggagacuccauagauacaccaaauuacgacguacaaaaacauauaaacaaacucugcggaauguuauuaauaacagaagacgcaaaccacaaauucacaggagucauagguaugcuauacgcaaugucaagauuaggaagagaagauacaauaaaaauacuaagagacgcaggauaccacguaaaagcaaacggaguagacguaacaacacauagacaagauauaaacgguaaagaaaugaaauucgaaguacuaacacuagccagucuaacaacagaaauacaaauaaacauagaaauagaaagccgaaaaucauacaaaaaaauguuaaaagaaaugggggaaguagcacccgaauacagacaugauucaccugacugcggaaugauaauacucugcauagcggcauuagucauaacaaaacuagccgcaggagacagaagcggauuaacagcaguaauaagaagagcaaauaauguauuaaaaaaugaaaugaaaagguauaaaggauuacuaccaaaagauauagcaaacucauucuaugaaguuuucgaaaaauacccacacuucauagacgucuucguacacuuuggaauagcacaaagcagcacaagaggaggaagcagaguagaaggaauauucgcaggacuauucaugaaugcauacggagccggacaaguaaugcuaagauggggaguuuuagcaaaaagcguaaaaaacauaauguuaggacacgccuccguccaagccgaaauggaacaaguaguagaaguauacgaauaugcacaaaaacuaggaggagaagcaggauucuaucacauacucaauaacccaaaagcaucacuauugagcuuaacacaauucccacauuuuucauccguaguccuaggaaaugcagcaggcuuaggaauaaugggagaauacagaggcacaccaagaaaucaagacuuauacgaugcagcaaaagcauacgcagaacaacuaaaagaaaacggaguaauaaacuacucaguauuagauuuaacagcagaagaauuagaagcaauaaaacaucaacuaaauccuaaggauaaugauguagaacucuaaggacuaguacuggcugcaucucccuuuccucuguccuccauccuucucccaggauggugaagggggaccugguacccagugauccccaccccaggauccuaaaucaugacuuaccugcuaauaaaaacucauuggaaaagugagaagaucuaaaaaaaaaaaaaaaaaaaaaaaaaaaaaaaaaaaaaaaaaaaaaaaaaaaaaaaaaaaaaaaaugcaucccccccccccccccccccccccccccccccaaaggcucuuuucagagccaccagaauu

SEQ ID NO: 20325 - RNA, 1551 nt, Artificial Sequence
  mRNA product Design c-3 comprising derived and/or modified sequence from HRSV(Memphis-37)__AIY60635.1__N (opt11)
gggagaguccgcucagccagguugcagaagcggcuuagcguguguccuaaucuucucucugcguguagguaggccugugccgcaaacaagcuuaccauggcccuaagcaaagucaaacucaacgacacacuaaacaaagaccaacuccucagcuccagcaaauacaccauccaacgauccaccggcgacuccauagacacccccaacuacgacguccaaaaacacaucaacaaacuaugcggcaugcuccuaaucacagaagacgccaaccacaaauucaccggagucaucggcaugcucuacgccaugagccgccucggccgagaagacacaaucaaaauacuaagagacgccggcuaccacguaaaagccaacggcguagacguaaccacccaccgccaagacaucaacggcaaagaaaugaaauucgaaguucucacccucgccucacuaaccacggaaauccaaauaaacauugaaaucgaaagcagaaaauccuacaaaaagaugcuaaaagaaaugggcgagguagccccagaauaccgccacgacagccccgacugcggaaugaucauccucugcauugcagcccucgucaucaccaaacuagccgccggcgacagaagcggccuaaccgcaguaauccgccgagccaacaacguacucaaaaacgaaaugaaacgcuacaaaggccuccuccccaaagacaucgccaacagcuucuacgaaguauucgaaaaauacccgcacuucaucgacgucuucguacacuucggcauagcccaaagcagcacacgaggcggcucccgcgucgaaggaauauucgccggccuguucaugaacgcauacggagcgggccaagucaugcuccgcugggguguacuagccaaguccgucaaaaacaucaugcuagggcacgcaagcguacaagccgaaauggaacaaguagucgaagucuacgaauacgcacaaaaacuaggcggcgaagccggcuucuaccacauccuaaacaaccccaaagccucauuacucucccucacccaauuuccucacuucuccagcgucguccucggaaacgccgccggccuaggcauaaugggggaauaccgcggcaccccgcgcaaccaagaccucuacgacgcagcaaaagccuacgcagaacaacuaaaagaaaacggagucaucaacuacagcguacuggaccuaaccgccgaagaacucgaagccauaaaacaccaacucaaccccaaagacaacgacgucgagcucuaaggacuaguacuggcugcaucucccuuuccucuguccuccauccuucucccaggauggugaagggggaccugguacccagugauccccaccccaggauccuaaaucaugacuuaccugcuaauaaaaacucauuggaaaagugagaagaucuaaaaaaaaaaaaaaaaaaaaaaaaaaaaaaaaaaaaaaaaaaaaaaaaaaaaaaaaaaaaaaaaugcaucccccccccccccccccccccccccccccccaaaggcucuuuucagagccaccagaauu

SEQ ID NO: 20326 - RNA, 1547 nt, Artificial Sequence
  mRNA product Design c-4 comprising derived and/or modified sequence from HRSV(Memphis-37)__AIY60635.1__N (wt)
gggagaguccgcucagccagguugcagaagcggcuuagcguguguccuaaucuucucucugcguguagguaggccugugccgcaaacaagcuuaccauggcucuuagcaaagucaaguugaacgauacacucaacaaagaucaacuucugucauccagcaaauacaccauccaacggagcacaggagauaguauugauacuccuaauuaugaugugcagaaacacaucaacaaguuauguggcauguuauuaaucacagaagaugcuaaucauaaauucacugggguaauagguauguuauaugcuaugucuagauuaggaagagaagacaccauaaaaauacucagagaugcgggauaucauguaaaagcaaauggaguggauguaacaacacaucgucaagacauuaauggaaaagaaaugaaauuugaaguguuaacauuggcaagcuuaacaacugaaauucaaaucaacauugagauagaaucuaggaaauccuacaaaaaaaugcuaaaagaaaugggagagguggcuccagaauacaggcaugacucuccugauuguggaaugauaauauuauguauagcagcauuaguaauaaccaaauuagcagcaggggauagaucuggucuuacugcugugauuaggagagcuaauaauguucuaaaaaaugaaaugaaacguuauaaaggcuuacuaccaaaggauauagccaacagcuucuaugaaguguuugaaaaauauccucacuuuauagauguuuuuguucauuuugguauagcacaaucuucuaccagagguggcaguagaguugaagggauuuuugcaggauuguuuaugaaugccuauggugcagggcaagugauguuacgguggggagucuuagcaaaaucaguuaaaaauauuaugcuaggacaugcuagugugcaagcagaaauggaacaaguuguggaaguuuaugaauaugcccaaaaauuggguggagaagcaggauucuaccauauauugaacaauccaaaagcaucauuauuaucuuugacucaauuuccccacuucuccaguguaguauugggcaaugcugcuggccuaggcauaaugggagaauacagagguacaccaaggaaucaagaucuauaugaugcugcaaaggcauaugcugaacaacucaaagaaaauggugugauuaacuacaguguauuagacuugacagcagaagaacuagaggcuaucaaacaucagcuuaauccaaaagauaaugauguagagcuuugaggacuaguggaagcauuuuccuggcugauuaaaagaaauuacucagcuauggucaucuguuccuguuagaaggcuaugcagcauauuauauacuaugcgcauguuaugaaaugcauaauaaaaaauuuuaaaaaaucuaaaagaucuaaaaaaaaaaaaaaaaaaaaaaaaaaaaaaaaaaaaaaaaaaaaaaaaaaaaaaaaaaaaaaaaugcaucccccccccccccccccccccccccccccccaaaggcucuuuucagagccaccagaauu

SEQ ID NO: 20327 - RNA, 1547 nt, Artificial Sequence
  mRNA product Design c-4 comprising derived and/or modified sequence from HRSV(Memphis-37)__AIY60635.1__N (opt1)
gggagaguccgcucagccagguugcagaagcggcuuagcguguguccuaaucuucucucugcguguagguaggccugugccgcaaacaagcuuaccauggcccugagcaaggugaagcucaacgacacccugaacaaggaccagcugcucuccagcuccaaguacaccauccagcgcagcaccggcgacuccaucgacacccccaacuacgacguccagaagcacaucaacaagcugugcgggaugcugcucaucaccgaggacgccaaccacaaguucaccggcgugaucgggaugcuguacgcgaugagccggcugggccgcgaggacacgaucaagauccuccgggacgccggguaccacgugaaggccaacggcgucgacgugaccacccaccgccaggacaucaacggcaaggagaugaaguucgaggugcugacccuggccucccucacgaccgagauccagaucaacaucgagaucgagagccggaaguccuacaagaagaugcugaaggagaugggggaggucgccccggaguaccgccacgacagccccgacugcggcaugaucauccugugcaucgcggcccucgugaucaccaagcuggccgccggggaccgguccggccugaccgcggugauccgccgggccaacaacguccucaagaacgagaugaagcgcuacaaggggcugcugcccaaggacaucgccaacagcuucuacgagguguucgagaaguacccccacuucaucgacguguucguccacuucggcaucgcccaguccagcacgcggggcgggucccgcguggagggcaucuucgccgggcuguucaugaacgcguacggcgccggccaggugaugcugcgguggggcguccuggccaagagcgugaagaacaucaugcucgggcacgccuccgugcaggccgagauggagcaggucguggagguguacgaguacgcgcagaagcucgggggcgaggccggguucuaccacauccugaacaacccgaaggccagccuccugucccugacccaguucccccacuucagcagcgucgugcucggcaacgccgccggccuggggaucaugggcgaguaccgcgggacgccccggaaccaggaccuguacgacgcggccaaggccuacgccgagcagcucaaggagaacggcgugaucaacuacuccguccuggaccugaccgccgaggagcucgaggcgaucaagcaccagcugaaccccaaggacaacgacguggagcugugaggacuaguggaagcauuuuccuggcugauuaaaagaaauuacucagcuauggucaucuguuccuguuagaaggcuaugcagcauauuauauacuaugcgcauguuaugaaaugcauaauaaaaaauuuuaaaaaaucuaaaagaucuaaaaaaaaaaaaaaaaaaaaaaaaaaaaaaaaaaaaaaaaaaaaaaaaaaaaaaaaaaaaaaaaugcaucccccccccccccccccccccccccccccccaaaggcucuuuucagagccaccagaauu

SEQ ID NO: 20328 - RNA, 1547 nt, Artificial Sequence
  mRNA product Design c-4 comprising derived and/or modified sequence from HRSV(Memphis-37)__AIY60635.1__N (opt2)
gggagaguccgcucagccagguugcagaagcggcuuagcguguguccuaaucuucucucugcguguagguaggccugugccgcaaacaagcuuaccauggcccucuccaaggucaagcucaacgacacccucaacaaggaccagcuccucuccuccuccaaguacaccauccagcgcuccaccggcgacuccaucgacacccccaacuacgacguccagaagcacaucaacaagcucugcggcaugcuccucaucaccgaggacgccaaccacaaguucaccggcgucaucggcaugcucuacgccaugucccgccucggccgcgaggacaccaucaagauccuccgcgacgccggcuaccacgucaaggccaacggcgucgacgucaccacccaccgccaggacaucaacggcaaggagaugaaguucgagguccucacccucgccucccucaccaccgagauccagaucaacaucgagaucgagucccgcaaguccuacaagaagaugcucaaggagaugggcgaggucgcccccgaguaccgccacgacucccccgacugcggcaugaucauccucugcaucgccgcccucgucaucaccaagcucgccgccggcgaccgcuccggccucaccgccgucauccgccgcgccaacaacguccucaagaacgagaugaagcgcuacaagggccuccuccccaaggacaucgccaacuccuucuacgaggucuucgagaaguacccccacuucaucgacgucuucguccacuucggcaucgcccaguccuccacccgcggcggcucccgcgucgagggcaucuucgccggccucuucaugaacgccuacggcgccggccaggucaugcuccgcuggggcguccucgccaaguccgucaagaacaucaugcucggccacgccuccguccaggccgagauggagcaggucgucgaggucuacgaguacgcccagaagcucggcggcgaggccggcuucuaccacauccucaacaaccccaaggccucccuccucucccucacccaguucccccacuucuccuccgucguccucggcaacgccgccggccucggcaucaugggcgaguaccgcggcaccccccgcaaccaggaccucuacgacgccgccaaggccuacgccgagcagcucaaggagaacggcgucaucaacuacuccguccucgaccucaccgccgaggagcucgaggccaucaagcaccagcucaaccccaaggacaacgacgucgagcucugaggacuaguggaagcauuuuccuggcugauuaaaagaaauuacucagcuauggucaucuguuccuguuagaaggcuaugcagcauauuauauacuaugcgcauguuaugaaaugcauaauaaaaaauuuuaaaaaaucuaaaagaucuaaaaaaaaaaaaaaaaaaaaaaaaaaaaaaaaaaaaaaaaaaaaaaaaaaaaaaaaaaaaaaaaugcaucccccccccccccccccccccccccccccccaaaggcucuuuucagagccaccagaauu

SEQ ID NO: 20329 - RNA, 1547 nt, Artificial Sequence
  mRNA product Design c-4 comprising derived and/or modified sequence from HRSV(Memphis-37)__AIY60635.1__N (opt3)
gggagaguccgcucagccagguugcagaagcggcuuagcguguguccuaaucuucucucugcguguagguaggccugugccgcaaacaagcuuaccauggcccugagcaaggugaaacucaacgacacccuuaauaaggaucagcuguuguccucuucaaaauacacaauccaaagaaguacuggcgacagcauugauacgcccaacuaugacguccagaagcacauaaauaaauuaugcgggaugcugcuaaucaccgaggaugcuaaccauaaguucacaggaguuauugguaugcucuacgcaauguccaggcugggccgggaagacacuaucaagauucuucgcgaugccggguaucacgugaaagcgaauggaguagacgugaccacacaucgacaggauaucaacggcaaggagaugaaauuugaaguccugaccuuggcuucucucacuacagagauacagaucaauauugaaaucgagucgcguaagucauacaaaaagaugcugaaggagaugggugaaguggccccugaguauagacacgacagcccagauugugggaugauuauccugugcauagcagcccucguuauuaccaaauuagcugcaggagacaggaguggccugacggccgugauccggcgcgcuaacaauguccuuaagaacgaaaugaaaagauacaagggcuugcugccgaaagauauugccaauuccuucuaugagguguuugagaaguacccccauuucaucgacguauuuguucacuucgggaucgcgcaaucuagcacuaggggagguucccggguggaaggcauuuuugcagggcuauucaugaacgccuacggagcuggccaggucaugcuccgcuggggugugcuggccaaaucagugaagaauauaaugcuugggcacgcaaguguccaggcugagauggaacagguuguggagguauaugaauacgcccaaaagcugggaggcgaggcgggcuuuuaucauaucuugaacaauccuaaagccagccuccugucuuuaacccaguucccacacuuuuccucagugguccuggggaacgcagcuggacucgguauuaugggcgaguaccgagggacacccagaaaccaggaccuuuaugaugccgcuaaggccuacgcagaacagcugaaagagaauggagugaucaacuauagcguuuuggaccuaacugccgaggaacuggaagcuauaaagcaucaacucaauccuaaagauaacgacguggagcugugaggacuaguggaagcauuuuccuggcugauuaaaagaaauuacucagcuauggucaucuguuccuguuagaaggcuaugcagcauauuauauacuaugcgcauguuaugaaaugcauaauaaaaaauuuuaaaaaaucuaaaagaucuaaaaaaaaaaaaaaaaaaaaaaaaaaaaaaaaaaaaaaaaaaaaaaaaaaaaaaaaaaaaaaaaugcaucccccccccccccccccccccccccccccccaaaggcucuuuucagagccaccagaauu

SEQ ID NO: 20330 - RNA, 1547 nt, Artificial Sequence
  mRNA product Design c-4 comprising derived and/or modified sequence from HRSV(Memphis-37)__AIY60635.1__N (opt4)
gggagaguccgcucagccagguugcagaagcggcuuagcguguguccuaaucuucucucugcguguagguaggccugugccgcaaacaagcuuaccauggcccugagcaaggugaagcugaacgacacccugaacaaggaccagcugcugagcagcagcaaguacaccauccagagaagcaccggcgacagcaucgacacccccaacuacgacgugcagaagcacaucaacaagcugugcggcaugcugcugaucaccgaggacgccaaccacaaguucaccggcgugaucggcaugcuguacgccaugagcagacugggcagagaggacaccaucaagauccugagagacgccggcuaccacgugaaggccaacggcguggacgugaccacccacagacaggacaucaacggcaaggagaugaaguucgaggugcugacccuggccagccugaccaccgagauccagaucaacaucgagaucgagagcagaaagagcuacaagaagaugcugaaggagaugggcgagguggcccccgaguacagacacgacagccccgacugcggcaugaucauccugugcaucgccgcccuggugaucaccaagcuggccgccggcgacagaagcggccugaccgccgugaucagaagagccaacaacgugcugaagaacgagaugaagagauacaagggccugcugcccaaggacaucgccaacagcuucuacgagguguucgagaaguacccccacuucaucgacguguucgugcacuucggcaucgcccagagcagcaccagaggcggcagcagaguggagggcaucuucgccggccuguucaugaacgccuacggcgccggccaggugaugcugagauggggcgugcuggccaagagcgugaagaacaucaugcugggccacgccagcgugcaggccgagauggagcaggugguggagguguacgaguacgcccagaagcugggcggcgaggccggcuucuaccacauccugaacaaccccaaggccagccugcugagccugacccaguucccccacuucagcagcguggugcugggcaacgccgccggccugggcaucaugggcgaguacagaggcacccccagaaaccaggaccuguacgacgccgccaaggccuacgccgagcagcugaaggagaacggcgugaucaacuacagcgugcuggaccugaccgccgaggagcuggaggccaucaagcaccagcugaaccccaaggacaacgacguggagcugugaggacuaguggaagcauuuuccuggcugauuaaaagaaauuacucagcuauggucaucuguuccuguuagaaggcuaugcagcauauuauauacuaugcgcauguuaugaaaugcauaauaaaaaauuuuaaaaaaucuaaaagaucuaaaaaaaaaaaaaaaaaaaaaaaaaaaaaaaaaaaaaaaaaaaaaaaaaaaaaaaaaaaaaaaaugcaucccccccccccccccccccccccccccccccaaaggcucuuuucagagccaccagaauu

SEQ ID NO: 20331 - RNA, 1547 nt, Artificial Sequence
  mRNA product Design c-4 comprising derived and/or modified sequence from HRSV(Memphis-37)__AIY60635.1__N (opt5)
gggagaguccgcucagccagguugcagaagcggcuuagcguguguccuaaucuucucucugcguguagguaggccugugccgcaaacaagcuuaccauggcccugagcaaggugaaacucaacgacacccugaauaaggaucagcuucuguccucuagcaaauacacaauccaaagauccacgggcgacucuauugauacccccaacuaugacguccagaagcacaucaauaaacucugcgggaugcugcuuauuacagaggaugcuaaccauaaguucaccggaguuaucggcaugcuguacgccaugagccggcucgggcgcgaagacacaauuaagauccugagagaugcgggauaucacgugaaagcuaauggcguggacgucaccacacaucggcaggauaucaacgggaaggagaugaaauuugaagugcugacccucgccucccugacgaccgagauucagaucaauauugaaaucgagucucgcaagagcuacaaaaagaugcuuaaggagaugggagaaguugccccugaguauagacacgacuccccggauuguggcaugauuauccugugcauugcugcccucgugaucacaaaacuggcugccggcgaccggagcgggcuuaccgcggucauccgcagagccaacaaugugcugaagaacgaaaugaaacgguacaagggacuccugcccaaagauauugcuaauucuuucuaugagguuuuugagaaguacccucauuucaucgacguguuuguccacuucggcauugcccaauccagcacacgcgggggaucuagaguggaaggcaucuuugcugggcuguucaugaacgccuacggagcgggccaggugaugcuccgguggggcguccuggccaaauccguuaagaauauuaugcuugggcacgcuagcgugcaggccgagauggaacagguggucgagguguaugaauacgcucaaaagcugggaggcgaggccggguuuuaucauauccucaacaaucccaaagccucucugcuuucccugacccaguucccucacuuuagcuccguugugcucggaaacgcugcgggccuggggaucaugggagaguaccgcggcacgcccagaaaccaggaccuguaugaugccgcuaaggccuacgccgaacagcucaaagagaauggcgucauuaacuauucugugcuggaccuuacagcugaggaacuggaagccaucaagcaucaacucaauccuaaagauaacgacguugagcugugaggacuaguggaagcauuuuccuggcugauuaaaagaaauuacucagcuauggucaucuguuccuguuagaaggcuaugcagcauauuauauacuaugcgcauguuaugaaaugcauaauaaaaaauuuuaaaaaaucuaaaagaucuaaaaaaaaaaaaaaaaaaaaaaaaaaaaaaaaaaaaaaaaaaaaaaaaaaaaaaaaaaaaaaaaugcaucccccccccccccccccccccccccccccccaaaggcucuuuucagagccaccagaauu

SEQ ID NO: 20332 - RNA, 1547 nt, Artificial Sequence
  mRNA product Design c-4 comprising derived and/or modified sequence from HRSV(Memphis-37)__AIY60635.1__N (opt6)
gggagaguccgcucagccagguugcagaagcggcuuagcguguguccuaaucuucucucugcguguagguaggccugugccgcaaacaagcuuaccauggccuuaaguaaaguaaaauuaaacgacacacuaaacaaagaccaauuacucucaucaucgaaauauacaauacaaagauccacaggagacuccauagauacaccaaauuacgacguacaaaaacauauaaacaaacucugcggaauguuauuaauaacagaagacgcaaaccacaaauucacaggagucauagguaugcuauacgcaaugucaagauuaggaagagaagauacaauaaaaauacuaagagacgcaggauaccacguaaaagcaaacggaguagacguaacaacacauagacaagauauaaacgguaaagaaaugaaauucgaaguacuaacacuagccagucuaacaacagaaauacaaauaaacauagaaauagaaagccgaaaaucauacaaaaaaauguuaaaagaaaugggggaaguagcacccgaauacagacaugauucaccugacugcggaaugauaauacucugcauagcggcauuagucauaacaaaacuagccgcaggagacagaagcggauuaacagcaguaauaagaagagcaaauaauguauuaaaaaaugaaaugaaaagguauaaaggauuacuaccaaaagauauagcaaacucauucuaugaaguuuucgaaaaauacccacacuucauagacgucuucguacacuuuggaauagcacaaagcagcacaagaggaggaagcagaguagaaggaauauucgcaggacuauucaugaaugcauacggagccggacaaguaaugcuaagauggggaguuuuagcaaaaagcguaaaaaacauaauguuaggacacgccuccguccaagccgaaauggaacaaguaguagaaguauacgaauaugcacaaaaacuaggaggagaagcaggauucuaucacauacucaauaacccaaaagcaucacuauugagcuuaacacaauucccacauuuuucauccguaguccuaggaaaugcagcaggcuuaggaauaaugggagaauacagaggcacaccaagaaaucaagacuuauacgaugcagcaaaagcauacgcagaacaacuaaaagaaaacggaguaauaaacuacucaguauuagauuuaacagcagaagaauuagaagcaauaaaacaucaacuaaauccuaaggauaaugauguagaacucuaaggacuaguggaagcauuuuccuggcugauuaaaagaaauuacucagcuauggucaucuguuccuguuagaaggcuaugcagcauauuauauacuaugcgcauguuaugaaaugcauaauaaaaaauuuuaaaaaaucuaaaagaucuaaaaaaaaaaaaaaaaaaaaaaaaaaaaaaaaaaaaaaaaaaaaaaaaaaaaaaaaaaaaaaaaugcaucccccccccccccccccccccccccccccccaaaggcucuuuucagagccaccagaauu

SEQ ID NO: 20333 - RNA, 1547 nt, Artificial Sequence
  mRNA product Design c-4 comprising derived and/or modified sequence from HRSV(Memphis-37)__AIY60635.1__N (opt11)
gggagaguccgcucagccagguugcagaagcggcuuagcguguguccuaaucuucucucugcguguagguaggccugugccgcaaacaagcuuaccauggcccuaagcaaagucaaacucaacgacacacuaaacaaagaccaacuccucagcuccagcaaauacaccauccaacgauccaccggcgacuccauagacacccccaacuacgacguccaaaaacacaucaacaaacuaugcggcaugcuccuaaucacagaagacgccaaccacaaauucaccggagucaucggcaugcucuacgccaugagccgccucggccgagaagacacaaucaaaauacuaagagacgccggcuaccacguaaaagccaacggcguagacguaaccacccaccgccaagacaucaacggcaaagaaaugaaauucgaaguucucacccucgccucacuaaccacggaaauccaaauaaacauugaaaucgaaagcagaaaauccuacaaaaagaugcuaaaagaaaugggcgagguagccccagaauaccgccacgacagccccgacugcggaaugaucauccucugcauugcagcccucgucaucaccaaacuagccgccggcgacagaagcggccuaaccgcaguaauccgccgagccaacaacguacucaaaaacgaaaugaaacgcuacaaaggccuccuccccaaagacaucgccaacagcuucuacgaaguauucgaaaaauacccgcacuucaucgacgucuucguacacuucggcauagcccaaagcagcacacgaggcggcucccgcgucgaaggaauauucgccggccuguucaugaacgcauacggagcgggccaagucaugcuccgcugggguguacuagccaaguccgucaaaaacaucaugcuagggcacgcaagcguacaagccgaaauggaacaaguagucgaagucuacgaauacgcacaaaaacuaggcggcgaagccggcuucuaccacauccuaaacaaccccaaagccucauuacucucccucacccaauuuccucacuucuccagcgucguccucggaaacgccgccggccuaggcauaaugggggaauaccgcggcaccccgcgcaaccaagaccucuacgacgcagcaaaagccuacgcagaacaacuaaaagaaaacggagucaucaacuacagcguacuggaccuaaccgccgaagaacucgaagccauaaaacaccaacucaaccccaaagacaacgacgucgagcucuaaggacuaguggaagcauuuuccuggcugauuaaaagaaauuacucagcuauggucaucuguuccuguuagaaggcuaugcagcauauuauauacuaugcgcauguuaugaaaugcauaauaaaaaauuuuaaaaaaucuaaaagaucuaaaaaaaaaaaaaaaaaaaaaaaaaaaaaaaaaaaaaaaaaaaaaaaaaaaaaaaaaaaaaaaaugcaucccccccccccccccccccccccccccccccaaaggcucuuuucagagccaccagaauu

SEQ ID NO: 20334 - RNA, 1465 nt, Artificial Sequence
  mRNA product Design c-5 comprising derived and/or modified sequence from HRSV(Memphis-37)__AIY60635.1__N (wt)
gggagagcggcucggccauuuugucccagucaguccggaggcugcggcugcagaaguaccgccugcggaguaacugcaaagaagcuuaccauggcucuuagcaaagucaaguugaacgauacacucaacaaagaucaacuucugucauccagcaaauacaccauccaacggagcacaggagauaguauugauacuccuaauuaugaugugcagaaacacaucaacaaguuauguggcauguuauuaaucacagaagaugcuaaucauaaauucacugggguaauagguauguuauaugcuaugucuagauuaggaagagaagacaccauaaaaauacucagagaugcgggauaucauguaaaagcaaauggaguggauguaacaacacaucgucaagacauuaauggaaaagaaaugaaauuugaaguguuaacauuggcaagcuuaacaacugaaauucaaaucaacauugagauagaaucuaggaaauccuacaaaaaaaugcuaaaagaaaugggagagguggcuccagaauacaggcaugacucuccugauuguggaaugauaauauuauguauagcagcauuaguaauaaccaaauuagcagcaggggauagaucuggucuuacugcugugauuaggagagcuaauaauguucuaaaaaaugaaaugaaacguuauaaaggcuuacuaccaaaggauauagccaacagcuucuaugaaguguuugaaaaauauccucacuuuauagauguuuuuguucauuuugguauagcacaaucuucuaccagagguggcaguagaguugaagggauuuuugcaggauuguuuaugaaugccuauggugcagggcaagugauguuacgguggggagucuuagcaaaaucaguuaaaaauauuaugcuaggacaugcuagugugcaagcagaaauggaacaaguuguggaaguuuaugaauaugcccaaaaauuggguggagaagcaggauucuaccauauauugaacaauccaaaagcaucauuauuaucuuugacucaauuuccccacuucuccaguguaguauugggcaaugcugcuggccuaggcauaaugggagaauacagagguacaccaaggaaucaagaucuauaugaugcugcaaaggcauaugcugaacaacucaaagaaaauggugugauuaacuacaguguauuagacuugacagcagaagaacuagaggcuaucaaacaucagcuuaauccaaaagauaaugauguagagcuuugaggacuagucccuguucccagagcccacuuuuuuuucuuuuuuugaaauaaaauagccugucuuucagaucuaaaaaaaaaaaaaaaaaaaaaaaaaaaaaaaaaaaaaaaaaaaaaaaaaaaaaaaaaaaaaaaaugcaucccccccccccccccccccccccccccccccaaaggcucuuuucagagccaccagaauu

SEQ ID NO: 20335 - RNA, 1465 nt, Artificial Sequence
  mRNA product Design c-5 comprising derived and/or modified sequence from HRSV(Memphis-37)__AIY60635.1__N (opt1)
gggagagcggcucggccauuuugucccagucaguccggaggcugcggcugcagaaguaccgccugcggaguaacugcaaagaagcuuaccauggcccugagcaaggugaagcucaacgacacccugaacaaggaccagcugcucuccagcuccaaguacaccauccagcgcagcaccggcgacuccaucgacacccccaacuacgacguccagaagcacaucaacaagcugugcgggaugcugcucaucaccgaggacgccaaccacaaguucaccggcgugaucgggaugcuguacgcgaugagccggcugggccgcgaggacacgaucaagauccuccgggacgccggguaccacgugaaggccaacggcgucgacgugaccacccaccgccaggacaucaacggcaaggagaugaaguucgaggugcugacccuggccucccucacgaccgagauccagaucaacaucgagaucgagagccggaaguccuacaagaagaugcugaaggagaugggggaggucgccccggaguaccgccacgacagccccgacugcggcaugaucauccugugcaucgcggcccucgugaucaccaagcuggccgccggggaccgguccggccugaccgcggugauccgccgggccaacaacguccucaagaacgagaugaagcgcuacaaggggcugcugcccaaggacaucgccaacagcuucuacgagguguucgagaaguacccccacuucaucgacguguucguccacuucggcaucgcccaguccagcacgcggggcgggucccgcguggagggcaucuucgccgggcuguucaugaacgcguacggcgccggccaggugaugcugcgguggggcguccuggccaagagcgugaagaacaucaugcucgggcacgccuccgugcaggccgagauggagcaggucguggagguguacgaguacgcgcagaagcucgggggcgaggccggguucuaccacauccugaacaacccgaaggccagccuccugucccugacccaguucccccacuucagcagcgucgugcucggcaacgccgccggccuggggaucaugggcgaguaccgcgggacgccccggaaccaggaccuguacgacgcggccaaggccuacgccgagcagcucaaggagaacggcgugaucaacuacuccguccuggaccugaccgccgaggagcucgaggcgaucaagcaccagcugaaccccaaggacaacgacguggagcugugaggacuagucccuguucccagagcccacuuuuuuuucuuuuuuugaaauaaaauagccugucuuucagaucuaaaaaaaaaaaaaaaaaaaaaaaaaaaaaaaaaaaaaaaaaaaaaaaaaaaaaaaaaaaaaaaaugcaucccccccccccccccccccccccccccccccaaaggcucuuuucagagccaccagaauu

SEQ ID NO: 20336 - RNA, 1465 nt, Artificial Sequence
  mRNA product Design c-5 comprising derived and/or modified sequence from HRSV(Memphis-37)__AIY60635.1__N (opt2)
gggagagcggcucggccauuuugucccagucaguccggaggcugcggcugcagaaguaccgccugcggaguaacugcaaagaagcuuaccauggcccucuccaaggucaagcucaacgacacccucaacaaggaccagcuccucuccuccuccaaguacaccauccagcgcuccaccggcgacuccaucgacacccccaacuacgacguccagaagcacaucaacaagcucugcggcaugcuccucaucaccgaggacgccaaccacaaguucaccggcgucaucggcaugcucuacgccaugucccgccucggccgcgaggacaccaucaagauccuccgcgacgccggcuaccacgucaaggccaacggcgucgacgucaccacccaccgccaggacaucaacggcaaggagaugaaguucgagguccucacccucgccucccucaccaccgagauccagaucaacaucgagaucgagucccgcaaguccuacaagaagaugcucaaggagaugggcgaggucgcccccgaguaccgccacgacucccccgacugcggcaugaucauccucugcaucgccgcccucgucaucaccaagcucgccgccggcgaccgcuccggccucaccgccgucauccgccgcgccaacaacguccucaagaacgagaugaagcgcuacaagggccuccuccccaaggacaucgccaacuccuucuacgaggucuucgagaaguacccccacuucaucgacgucuucguccacuucggcaucgcccaguccuccacccgcggcggcucccgcgucgagggcaucuucgccggccucuucaugaacgccuacggcgccggccaggucaugcuccgcuggggcguccucgccaaguccgucaagaacaucaugcucggccacgccuccguccaggccgagauggagcaggucgucgaggucuacgaguacgcccagaagcucggcggcgaggccggcuucuaccacauccucaacaaccccaaggccucccuccucucccucacccaguucccccacuucuccuccgucguccucggcaacgccgccggccucggcaucaugggcgaguaccgcggcaccccccgcaaccaggaccucuacgacgccgccaaggccuacgccgagcagcucaaggagaacggcgucaucaacuacuccguccucgaccucaccgccgaggagcucgaggccaucaagcaccagcucaaccccaaggacaacgacgucgagcucugaggacuagucccuguucccagagcccacuuuuuuuucuuuuuuugaaauaaaauagccugucuuucagaucuaaaaaaaaaaaaaaaaaaaaaaaaaaaaaaaaaaaaaaaaaaaaaaaaaaaaaaaaaaaaaaaaugcaucccccccccccccccccccccccccccccccaaaggcucuuuucagagccaccagaauu

SEQ ID NO: 20337 - RNA, 1465 nt, Artificial Sequence
  mRNA product Design c-5 comprising derived and/or modified sequence from HRSV(Memphis-37)__AIY60635.1__N (opt3)
gggagagcggcucggccauuuugucccagucaguccggaggcugcggcugcagaaguaccgccugcggaguaacugcaaagaagcuuaccauggcccugagcaaggugaaacucaacgacacccuuaauaaggaucagcuguuguccucuucaaaauacacaauccaaagaaguacuggcgacagcauugauacgcccaacuaugacguccagaagcacauaaauaaauuaugcgggaugcugcuaaucaccgaggaugcuaaccauaaguucacaggaguuauugguaugcucuacgcaauguccaggcugggccgggaagacacuaucaagauucuucgcgaugccggguaucacgugaaagcgaauggaguagacgugaccacacaucgacaggauaucaacggcaaggagaugaaauuugaaguccugaccuuggcuucucucacuacagagauacagaucaauauugaaaucgagucgcguaagucauacaaaaagaugcugaaggagaugggugaaguggccccugaguauagacacgacagcccagauugugggaugauuauccugugcauagcagcccucguuauuaccaaauuagcugcaggagacaggaguggccugacggccgugauccggcgcgcuaacaauguccuuaagaacgaaaugaaaagauacaagggcuugcugccgaaagauauugccaauuccuucuaugagguguuugagaaguacccccauuucaucgacguauuuguucacuucgggaucgcgcaaucuagcacuaggggagguucccggguggaaggcauuuuugcagggcuauucaugaacgccuacggagcuggccaggucaugcuccgcuggggugugcuggccaaaucagugaagaauauaaugcuugggcacgcaaguguccaggcugagauggaacagguuguggagguauaugaauacgcccaaaagcugggaggcgaggcgggcuuuuaucauaucuugaacaauccuaaagccagccuccugucuuuaacccaguucccacacuuuuccucagugguccuggggaacgcagcuggacucgguauuaugggcgaguaccgagggacacccagaaaccaggaccuuuaugaugccgcuaaggccuacgcagaacagcugaaagagaauggagugaucaacuauagcguuuuggaccuaacugccgaggaacuggaagcuauaaagcaucaacucaauccuaaagauaacgacguggagcugugaggacuagucccuguucccagagcccacuuuuuuuucuuuuuuugaaauaaaauagccugucuuucagaucuaaaaaaaaaaaaaaaaaaaaaaaaaaaaaaaaaaaaaaaaaaaaaaaaaaaaaaaaaaaaaaaaugcaucccccccccccccccccccccccccccccccaaaggcucuuuucagagccaccagaauu

SEQ ID NO: 20338 - RNA, 1465 nt, Artificial Sequence
  mRNA product Design c-5 comprising derived and/or modified sequence from HRSV(Memphis-37)__AIY60635.1__N (opt4)
gggagagcggcucggccauuuugucccagucaguccggaggcugcggcugcagaaguaccgccugcggaguaacugcaaagaagcuuaccauggcccugagcaaggugaagcugaacgacacccugaacaaggaccagcugcugagcagcagcaaguacaccauccagagaagcaccggcgacagcaucgacacccccaacuacgacgugcagaagcacaucaacaagcugugcggcaugcugcugaucaccgaggacgccaaccacaaguucaccggcgugaucggcaugcuguacgccaugagcagacugggcagagaggacaccaucaagauccugagagacgccggcuaccacgugaaggccaacggcguggacgugaccacccacagacaggacaucaacggcaaggagaugaaguucgaggugcugacccuggccagccugaccaccgagauccagaucaacaucgagaucgagagcagaaagagcuacaagaagaugcugaaggagaugggcgagguggcccccgaguacagacacgacagccccgacugcggcaugaucauccugugcaucgccgcccuggugaucaccaagcuggccgccggcgacagaagcggccugaccgccgugaucagaagagccaacaacgugcugaagaacgagaugaagagauacaagggccugcugcccaaggacaucgccaacagcuucuacgagguguucgagaaguacccccacuucaucgacguguucgugcacuucggcaucgcccagagcagcaccagaggcggcagcagaguggagggcaucuucgccggccuguucaugaacgccuacggcgccggccaggugaugcugagauggggcgugcuggccaagagcgugaagaacaucaugcugggccacgccagcgugcaggccgagauggagcaggugguggagguguacgaguacgcccagaagcugggcggcgaggccggcuucuaccacauccugaacaaccccaaggccagccugcugagccugacccaguucccccacuucagcagcguggugcugggcaacgccgccggccugggcaucaugggcgaguacagaggcacccccagaaaccaggaccuguacgacgccgccaaggccuacgccgagcagcugaaggagaacggcgugaucaacuacagcgugcuggaccugaccgccgaggagcuggaggccaucaagcaccagcugaaccccaaggacaacgacguggagcugugaggacuagucccuguucccagagcccacuuuuuuuucuuuuuuugaaauaaaauagccugucuuucagaucuaaaaaaaaaaaaaaaaaaaaaaaaaaaaaaaaaaaaaaaaaaaaaaaaaaaaaaaaaaaaaaaaugcaucccccccccccccccccccccccccccccccaaaggcucuuuucagagccaccagaauu

SEQ ID NO: 20339 - RNA, 1465 nt, Artificial Sequence
  mRNA product Design c-5 comprising derived and/or modified sequence from HRSV(Memphis-37)__AIY60635.1__N (opt5)
gggagagcggcucggccauuuugucccagucaguccggaggcugcggcugcagaaguaccgccugcggaguaacugcaaagaagcuuaccauggcccugagcaaggugaaacucaacgacacccugaauaaggaucagcuucuguccucuagcaaauacacaauccaaagauccacgggcgacucuauugauacccccaacuaugacguccagaagcacaucaauaaacucugcgggaugcugcuuauuacagaggaugcuaaccauaaguucaccggaguuaucggcaugcuguacgccaugagccggcucgggcgcgaagacacaauuaagauccugagagaugcgggauaucacgugaaagcuaauggcguggacgucaccacacaucggcaggauaucaacgggaaggagaugaaauuugaagugcugacccucgccucccugacgaccgagauucagaucaauauugaaaucgagucucgcaagagcuacaaaaagaugcuuaaggagaugggagaaguugccccugaguauagacacgacuccccggauuguggcaugauuauccugugcauugcugcccucgugaucacaaaacuggcugccggcgaccggagcgggcuuaccgcggucauccgcagagccaacaaugugcugaagaacgaaaugaaacgguacaagggacuccugcccaaagauauugcuaauucuuucuaugagguuuuugagaaguacccucauuucaucgacguguuuguccacuucggcauugcccaauccagcacacgcgggggaucuagaguggaaggcaucuuugcugggcuguucaugaacgccuacggagcgggccaggugaugcuccgguggggcguccuggccaaauccguuaagaauauuaugcuugggcacgcuagcgugcaggccgagauggaacagguggucgagguguaugaauacgcucaaaagcugggaggcgaggccggguuuuaucauauccucaacaaucccaaagccucucugcuuucccugacccaguucccucacuuuagcuccguugugcucggaaacgcugcgggccuggggaucaugggagaguaccgcggcacgcccagaaaccaggaccuguaugaugccgcuaaggccuacgccgaacagcucaaagagaauggcgucauuaacuauucugugcuggaccuuacagcugaggaacuggaagccaucaagcaucaacucaauccuaaagauaacgacguugagcugugaggacuagucccuguucccagagcccacuuuuuuuucuuuuuuugaaauaaaauagccugucuuucagaucuaaaaaaaaaaaaaaaaaaaaaaaaaaaaaaaaaaaaaaaaaaaaaaaaaaaaaaaaaaaaaaaaugcaucccccccccccccccccccccccccccccccaaaggcucuuuucagagccaccagaauu

SEQ ID NO: 20340 - RNA, 1465 nt, Artificial Sequence
  mRNA product Design c-5 comprising derived and/or modified sequence from HRSV(Memphis-37)__AIY60635.1__N (opt6)
gggagagcggcucggccauuuugucccagucaguccggaggcugcggcugcagaaguaccgccugcggaguaacugcaaagaagcuuaccauggccuuaaguaaaguaaaauuaaacgacacacuaaacaaagaccaauuacucucaucaucgaaauauacaauacaaagauccacaggagacuccauagauacaccaaauuacgacguacaaaaacauauaaacaaacucugcggaauguuauuaauaacagaagacgcaaaccacaaauucacaggagucauagguaugcuauacgcaaugucaagauuaggaagagaagauacaauaaaaauacuaagagacgcaggauaccacguaaaagcaaacggaguagacguaacaacacauagacaagauauaaacgguaaagaaaugaaauucgaaguacuaacacuagccagucuaacaacagaaauacaaauaaacauagaaauagaaagccgaaaaucauacaaaaaaauguuaaaagaaaugggggaaguagcacccgaauacagacaugauucaccugacugcggaaugauaauacucugcauagcggcauuagucauaacaaaacuagccgcaggagacagaagcggauuaacagcaguaauaagaagagcaaauaauguauuaaaaaaugaaaugaaaagguauaaaggauuacuaccaaaagauauagcaaacucauucuaugaaguuuucgaaaaauacccacacuucauagacgucuucguacacuuuggaauagcacaaagcagcacaagaggaggaagcagaguagaaggaauauucgcaggacuauucaugaaugcauacggagccggacaaguaaugcuaagauggggaguuuuagcaaaaagcguaaaaaacauaauguuaggacacgccuccguccaagccgaaauggaacaaguaguagaaguauacgaauaugcacaaaaacuaggaggagaagcaggauucuaucacauacucaauaacccaaaagcaucacuauugagcuuaacacaauucccacauuuuucauccguaguccuaggaaaugcagcaggcuuaggaauaaugggagaauacagaggcacaccaagaaaucaagacuuauacgaugcagcaaaagcauacgcagaacaacuaaaagaaaacggaguaauaaacuacucaguauuagauuuaacagcagaagaauuagaagcaauaaaacaucaacuaaauccuaaggauaaugauguagaacucuaaggacuagucccuguucccagagcccacuuuuuuuucuuuuuuugaaauaaaauagccugucuuucagaucuaaaaaaaaaaaaaaaaaaaaaaaaaaaaaaaaaaaaaaaaaaaaaaaaaaaaaaaaaaaaaaaaugcaucccccccccccccccccccccccccccccccaaaggcucuuuucagagccaccagaauu

SEQ ID NO: 20341 - RNA, 1465 nt, Artificial Sequence
  mRNA product Design c-5 comprising derived and/or modified sequence from HRSV(Memphis-37)__AIY60635.1__N (opt11)
gggagagcggcucggccauuuugucccagucaguccggaggcugcggcugcagaaguaccgccugcggaguaacugcaaagaagcuuaccauggcccuaagcaaagucaaacucaacgacacacuaaacaaagaccaacuccucagcuccagcaaauacaccauccaacgauccaccggcgacuccauagacacccccaacuacgacguccaaaaacacaucaacaaacuaugcggcaugcuccuaaucacagaagacgccaaccacaaauucaccggagucaucggcaugcucuacgccaugagccgccucggccgagaagacacaaucaaaauacuaagagacgccggcuaccacguaaaagccaacggcguagacguaaccacccaccgccaagacaucaacggcaaagaaaugaaauucgaaguucucacccucgccucacuaaccacggaaauccaaauaaacauugaaaucgaaagcagaaaauccuacaaaaagaugcuaaaagaaaugggcgagguagccccagaauaccgccacgacagccccgacugcggaaugaucauccucugcauugcagcccucgucaucaccaaacuagccgccggcgacagaagcggccuaaccgcaguaauccgccgagccaacaacguacucaaaaacgaaaugaaacgcuacaaaggccuccuccccaaagacaucgccaacagcuucuacgaaguauucgaaaaauacccgcacuucaucgacgucuucguacacuucggcauagcccaaagcagcacacgaggcggcucccgcgucgaaggaauauucgccggccuguucaugaacgcauacggagcgggccaagucaugcuccgcugggguguacuagccaaguccgucaaaaacaucaugcuagggcacgcaagcguacaagccgaaauggaacaaguagucgaagucuacgaauacgcacaaaaacuaggcggcgaagccggcuucuaccacauccuaaacaaccccaaagccucauuacucucccucacccaauuuccucacuucuccagcgucguccucggaaacgccgccggccuaggcauaaugggggaauaccgcggcaccccgcgcaaccaagaccucuacgacgcagcaaaagccuacgcagaacaacuaaaagaaaacggagucaucaacuacagcguacuggaccuaaccgccgaagaacucgaagccauaaaacaccaacucaaccccaaagacaacgacgucgagcucuaaggacuagucccuguucccagagcccacuuuuuuuucuuuuuuugaaauaaaauagccugucuuucagaucuaaaaaaaaaaaaaaaaaaaaaaaaaaaaaaaaaaaaaaaaaaaaaaaaaaaaaaaaaaaaaaaaugcaucccccccccccccccccccccccccccccccaaaggcucuuuucagagccaccagaauu

SEQ ID NO: 20342 - RNA, 1474 nt, Artificial Sequence
  mRNA product Design d-1 comprising derived and/or modified sequence from HRSV(Memphis-37)__AIY60635.1__N (wt)
gggagacccgugacccggaaguuguacggcuacgcgacuuucccucccacaaacccucgcgcccuuccuuuccuacuugggcccggcagaaagcuuaccauggcucuuagcaaagucaaguugaacgauacacucaacaaagaucaacuucugucauccagcaaauacaccauccaacggagcacaggagauaguauugauacuccuaauuaugaugugcagaaacacaucaacaaguuauguggcauguuauuaaucacagaagaugcuaaucauaaauucacugggguaauagguauguuauaugcuaugucuagauuaggaagagaagacaccauaaaaauacucagagaugcgggauaucauguaaaagcaaauggaguggauguaacaacacaucgucaagacauuaauggaaaagaaaugaaauuugaaguguuaacauuggcaagcuuaacaacugaaauucaaaucaacauugagauagaaucuaggaaauccuacaaaaaaaugcuaaaagaaaugggagagguggcuccagaauacaggcaugacucuccugauuguggaaugauaauauuauguauagcagcauuaguaauaaccaaauuagcagcaggggauagaucuggucuuacugcugugauuaggagagcuaauaauguucuaaaaaaugaaaugaaacguuauaaaggcuuacuaccaaaggauauagccaacagcuucuaugaaguguuugaaaaauauccucacuuuauagauguuuuuguucauuuugguauagcacaaucuucuaccagagguggcaguagaguugaagggauuuuugcaggauuguuuaugaaugccuauggugcagggcaagugauguuacgguggggagucuuagcaaaaucaguuaaaaauauuaugcuaggacaugcuagugugcaagcagaaauggaacaaguuguggaaguuuaugaauaugcccaaaaauuggguggagaagcaggauucuaccauauauugaacaauccaaaagcaucauuauuaucuuugacucaauuuccccacuucuccaguguaguauugggcaaugcugcuggccuaggcauaaugggagaauacagagguacaccaaggaaucaagaucuauaugaugcugcaaaggcauaugcugaacaacucaaagaaaauggugugauuaacuacaguguauuagacuugacagcagaagaacuagaggcuaucaaacaucagcuuaauccaaaagauaaugauguagagcuuugaggacuagucccuguucccagagcccacuuuuuuuucuuuuuuugaaauaaaauagccugucuuucagaucuaaaaaaaaaaaaaaaaaaaaaaaaaaaaaaaaaaaaaaaaaaaaaaaaaaaaaaaaaaaaaaaaugcaucccccccccccccccccccccccccccccccaaaggcucuuuucagagccaccagaauu

SEQ ID NO: 20343 - RNA, 1474 nt, Artificial Sequence
  mRNA product Design d-1 comprising derived and/or modified sequence from HRSV(Memphis-37)__AIY60635.1__N (opt1)
gggagacccgugacccggaaguuguacggcuacgcgacuuucccucccacaaacccucgcgcccuuccuuuccuacuugggcccggcagaaagcuuaccauggcccugagcaaggugaagcucaacgacacccugaacaaggaccagcugcucuccagcuccaaguacaccauccagcgcagcaccggcgacuccaucgacacccccaacuacgacguccagaagcacaucaacaagcugugcgggaugcugcucaucaccgaggacgccaaccacaaguucaccggcgugaucgggaugcuguacgcgaugagccggcugggccgcgaggacacgaucaagauccuccgggacgccggguaccacgugaaggccaacggcgucgacgugaccacccaccgccaggacaucaacggcaaggagaugaaguucgaggugcugacccuggccucccucacgaccgagauccagaucaacaucgagaucgagagccggaaguccuacaagaagaugcugaaggagaugggggaggucgccccggaguaccgccacgacagccccgacugcggcaugaucauccugugcaucgcggcccucgugaucaccaagcuggccgccggggaccgguccggccugaccgcggugauccgccgggccaacaacguccucaagaacgagaugaagcgcuacaaggggcugcugcccaaggacaucgccaacagcuucuacgagguguucgagaaguacccccacuucaucgacguguucguccacuucggcaucgcccaguccagcacgcggggcgggucccgcguggagggcaucuucgccgggcuguucaugaacgcguacggcgccggccaggugaugcugcgguggggcguccuggccaagagcgugaagaacaucaugcucgggcacgccuccgugcaggccgagauggagcaggucguggagguguacgaguacgcgcagaagcucgggggcgaggccggguucuaccacauccugaacaacccgaaggccagccuccugucccugacccaguucccccacuucagcagcgucgugcucggcaacgccgccggccuggggaucaugggcgaguaccgcgggacgccccggaaccaggaccuguacgacgcggccaaggccuacgccgagcagcucaaggagaacggcgugaucaacuacuccguccuggaccugaccgccgaggagcucgaggcgaucaagcaccagcugaaccccaaggacaacgacguggagcugugaggacuagucccuguucccagagcccacuuuuuuuucuuuuuuugaaauaaaauagccugucuuucagaucuaaaaaaaaaaaaaaaaaaaaaaaaaaaaaaaaaaaaaaaaaaaaaaaaaaaaaaaaaaaaaaaaugcaucccccccccccccccccccccccccccccccaaaggcucuuuucagagccaccagaauu

SEQ ID NO: 20344 - RNA, 1474 nt, Artificial Sequence
  mRNA product Design d-1 comprising derived and/or modified sequence from HRSV(Memphis-37)__AIY60635.1__N (opt2)
gggagacccgugacccggaaguuguacggcuacgcgacuuucccucccacaaacccucgcgcccuuccuuuccuacuugggcccggcagaaagcuuaccauggcccucuccaaggucaagcucaacgacacccucaacaaggaccagcuccucuccuccuccaaguacaccauccagcgcuccaccggcgacuccaucgacacccccaacuacgacguccagaagcacaucaacaagcucugcggcaugcuccucaucaccgaggacgccaaccacaaguucaccggcgucaucggcaugcucuacgccaugucccgccucggccgcgaggacaccaucaagauccuccgcgacgccggcuaccacgucaaggccaacggcgucgacgucaccacccaccgccaggacaucaacggcaaggagaugaaguucgagguccucacccucgccucccucaccaccgagauccagaucaacaucgagaucgagucccgcaaguccuacaagaagaugcucaaggagaugggcgaggucgcccccgaguaccgccacgacucccccgacugcggcaugaucauccucugcaucgccgcccucgucaucaccaagcucgccgccggcgaccgcuccggccucaccgccgucauccgccgcgccaacaacguccucaagaacgagaugaagcgcuacaagggccuccuccccaaggacaucgccaacuccuucuacgaggucuucgagaaguacccccacuucaucgacgucuucguccacuucggcaucgcccaguccuccacccgcggcggcucccgcgucgagggcaucuucgccggccucuucaugaacgccuacggcgccggccaggucaugcuccgcuggggcguccucgccaaguccgucaagaacaucaugcucggccacgccuccguccaggccgagauggagcaggucgucgaggucuacgaguacgcccagaagcucggcggcgaggccggcuucuaccacauccucaacaaccccaaggccucccuccucucccucacccaguucccccacuucuccuccgucguccucggcaacgccgccggccucggcaucaugggcgaguaccgcggcaccccccgcaaccaggaccucuacgacgccgccaaggccuacgccgagcagcucaaggagaacggcgucaucaacuacuccguccucgaccucaccgccgaggagcucgaggccaucaagcaccagcucaaccccaaggacaacgacgucgagcucugaggacuagucccuguucccagagcccacuuuuuuuucuuuuuuugaaauaaaauagccugucuuucagaucuaaaaaaaaaaaaaaaaaaaaaaaaaaaaaaaaaaaaaaaaaaaaaaaaaaaaaaaaaaaaaaaaugcaucccccccccccccccccccccccccccccccaaaggcucuuuucagagccaccagaauu

SEQ ID NO: 20345 - RNA, 1474 nt, Artificial Sequence
  mRNA product Design d-1 comprising derived and/or modified sequence from HRSV(Memphis-37)__AIY60635.1__N (opt3)
gggagacccgugacccggaaguuguacggcuacgcgacuuucccucccacaaacccucgcgcccuuccuuuccuacuugggcccggcagaaagcuuaccauggcccugagcaaggugaaacucaacgacacccuuaauaaggaucagcuguuguccucuucaaaauacacaauccaaagaaguacuggcgacagcauugauacgcccaacuaugacguccagaagcacauaaauaaauuaugcgggaugcugcuaaucaccgaggaugcuaaccauaaguucacaggaguuauugguaugcucuacgcaauguccaggcugggccgggaagacacuaucaagauucuucgcgaugccggguaucacgugaaagcgaauggaguagacgugaccacacaucgacaggauaucaacggcaaggagaugaaauuugaaguccugaccuuggcuucucucacuacagagauacagaucaauauugaaaucgagucgcguaagucauacaaaaagaugcugaaggagaugggugaaguggccccugaguauagacacgacagcccagauugugggaugauuauccugugcauagcagcccucguuauuaccaaauuagcugcaggagacaggaguggccugacggccgugauccggcgcgcuaacaauguccuuaagaacgaaaugaaaagauacaagggcuugcugccgaaagauauugccaauuccuucuaugagguguuugagaaguacccccauuucaucgacguauuuguucacuucgggaucgcgcaaucuagcacuaggggagguucccggguggaaggcauuuuugcagggcuauucaugaacgccuacggagcuggccaggucaugcuccgcuggggugugcuggccaaaucagugaagaauauaaugcuugggcacgcaaguguccaggcugagauggaacagguuguggagguauaugaauacgcccaaaagcugggaggcgaggcgggcuuuuaucauaucuugaacaauccuaaagccagccuccugucuuuaacccaguucccacacuuuuccucagugguccuggggaacgcagcuggacucgguauuaugggcgaguaccgagggacacccagaaaccaggaccuuuaugaugccgcuaaggccuacgcagaacagcugaaagagaauggagugaucaacuauagcguuuuggaccuaacugccgaggaacuggaagcuauaaagcaucaacucaauccuaaagauaacgacguggagcugugaggacuagucccuguucccagagcccacuuuuuuuucuuuuuuugaaauaaaauagccugucuuucagaucuaaaaaaaaaaaaaaaaaaaaaaaaaaaaaaaaaaaaaaaaaaaaaaaaaaaaaaaaaaaaaaaaugcaucccccccccccccccccccccccccccccccaaaggcucuuuucagagccaccagaauu

SEQ ID NO: 20346 - RNA, 1474 nt, Artificial Sequence
  mRNA product Design d-1 comprising derived and/or modified sequence from HRSV(Memphis-37)__AIY60635.1__N (opt4)
gggagacccgugacccggaaguuguacggcuacgcgacuuucccucccacaaacccucgcgcccuuccuuuccuacuugggcccggcagaaagcuuaccauggcccugagcaaggugaagcugaacgacacccugaacaaggaccagcugcugagcagcagcaaguacaccauccagagaagcaccggcgacagcaucgacacccccaacuacgacgugcagaagcacaucaacaagcugugcggcaugcugcugaucaccgaggacgccaaccacaaguucaccggcgugaucggcaugcuguacgccaugagcagacugggcagagaggacaccaucaagauccugagagacgccggcuaccacgugaaggccaacggcguggacgugaccacccacagacaggacaucaacggcaaggagaugaaguucgaggugcugacccuggccagccugaccaccgagauccagaucaacaucgagaucgagagcagaaagagcuacaagaagaugcugaaggagaugggcgagguggcccccgaguacagacacgacagccccgacugcggcaugaucauccugugcaucgccgcccuggugaucaccaagcuggccgccggcgacagaagcggccugaccgccgugaucagaagagccaacaacgugcugaagaacgagaugaagagauacaagggccugcugcccaaggacaucgccaacagcuucuacgagguguucgagaaguacccccacuucaucgacguguucgugcacuucggcaucgcccagagcagcaccagaggcggcagcagaguggagggcaucuucgccggccuguucaugaacgccuacggcgccggccaggugaugcugagauggggcgugcuggccaagagcgugaagaacaucaugcugggccacgccagcgugcaggccgagauggagcaggugguggagguguacgaguacgcccagaagcugggcggcgaggccggcuucuaccacauccugaacaaccccaaggccagccugcugagccugacccaguucccccacuucagcagcguggugcugggcaacgccgccggccugggcaucaugggcgaguacagaggcacccccagaaaccaggaccuguacgacgccgccaaggccuacgccgagcagcugaaggagaacggcgugaucaacuacagcgugcuggaccugaccgccgaggagcuggaggccaucaagcaccagcugaaccccaaggacaacgacguggagcugugaggacuagucccuguucccagagcccacuuuuuuuucuuuuuuugaaauaaaauagccugucuuucagaucuaaaaaaaaaaaaaaaaaaaaaaaaaaaaaaaaaaaaaaaaaaaaaaaaaaaaaaaaaaaaaaaaugcaucccccccccccccccccccccccccccccccaaaggcucuuuucagagccaccagaauu

SEQ ID NO: 20347 - RNA, 1474 nt, Artificial Sequence
  mRNA product Design d-1 comprising derived and/or modified sequence from HRSV(Memphis-37)__AIY60635.1__N (opt5)
gggagacccgugacccggaaguuguacggcuacgcgacuuucccucccacaaacccucgcgcccuuccuuuccuacuugggcccggcagaaagcuuaccauggcccugagcaaggugaaacucaacgacacccugaauaaggaucagcuucuguccucuagcaaauacacaauccaaagauccacgggcgacucuauugauacccccaacuaugacguccagaagcacaucaauaaacucugcgggaugcugcuuauuacagaggaugcuaaccauaaguucaccggaguuaucggcaugcuguacgccaugagccggcucgggcgcgaagacacaauuaagauccugagagaugcgggauaucacgugaaagcuaauggcguggacgucaccacacaucggcaggauaucaacgggaaggagaugaaauuugaagugcugacccucgccucccugacgaccgagauucagaucaauauugaaaucgagucucgcaagagcuacaaaaagaugcuuaaggagaugggagaaguugccccugaguauagacacgacuccccggauuguggcaugauuauccugugcauugcugcccucgugaucacaaaacuggcugccggcgaccggagcgggcuuaccgcggucauccgcagagccaacaaugugcugaagaacgaaaugaaacgguacaagggacuccugcccaaagauauugcuaauucuuucuaugagguuuuugagaaguacccucauuucaucgacguguuuguccacuucggcauugcccaauccagcacacgcgggggaucuagaguggaaggcaucuuugcugggcuguucaugaacgccuacggagcgggccaggugaugcuccgguggggcguccuggccaaauccguuaagaauauuaugcuugggcacgcuagcgugcaggccgagauggaacagguggucgagguguaugaauacgcucaaaagcugggaggcgaggccggguuuuaucauauccucaacaaucccaaagccucucugcuuucccugacccaguucccucacuuuagcuccguugugcucggaaacgcugcgggccuggggaucaugggagaguaccgcggcacgcccagaaaccaggaccuguaugaugccgcuaaggccuacgccgaacagcucaaagagaauggcgucauuaacuauucugugcuggaccuuacagcugaggaacuggaagccaucaagcaucaacucaauccuaaagauaacgacguugagcugugaggacuagucccuguucccagagcccacuuuuuuuucuuuuuuugaaauaaaauagccugucuuucagaucuaaaaaaaaaaaaaaaaaaaaaaaaaaaaaaaaaaaaaaaaaaaaaaaaaaaaaaaaaaaaaaaaugcaucccccccccccccccccccccccccccccccaaaggcucuuuucagagccaccagaauu

SEQ ID NO: 20348 - RNA, 1474 nt, Artificial Sequence
  mRNA product Design d-1 comprising derived and/or modified sequence from HRSV(Memphis-37)__AIY60635.1__N (opt6)
gggagacccgugacccggaaguuguacggcuacgcgacuuucccucccacaaacccucgcgcccuuccuuuccuacuugggcccggcagaaagcuuaccauggccuuaaguaaaguaaaauuaaacgacacacuaaacaaagaccaauuacucucaucaucgaaauauacaauacaaagauccacaggagacuccauagauacaccaaauuacgacguacaaaaacauauaaacaaacucugcggaauguuauuaauaacagaagacgcaaaccacaaauucacaggagucauagguaugcuauacgcaaugucaagauuaggaagagaagauacaauaaaaauacuaagagacgcaggauaccacguaaaagcaaacggaguagacguaacaacacauagacaagauauaaacgguaaagaaaugaaauucgaaguacuaacacuagccagucuaacaacagaaauacaaauaaacauagaaauagaaagccgaaaaucauacaaaaaaauguuaaaagaaaugggggaaguagcacccgaauacagacaugauucaccugacugcggaaugauaauacucugcauagcggcauuagucauaacaaaacuagccgcaggagacagaagcggauuaacagcaguaauaagaagagcaaauaauguauuaaaaaaugaaaugaaaagguauaaaggauuacuaccaaaagauauagcaaacucauucuaugaaguuuucgaaaaauacccacacuucauagacgucuucguacacuuuggaauagcacaaagcagcacaagaggaggaagcagaguagaaggaauauucgcaggacuauucaugaaugcauacggagccggacaaguaaugcuaagauggggaguuuuagcaaaaagcguaaaaaacauaauguuaggacacgccuccguccaagccgaaauggaacaaguaguagaaguauacgaauaugcacaaaaacuaggaggagaagcaggauucuaucacauacucaauaacccaaaagcaucacuauugagcuuaacacaauucccacauuuuucauccguaguccuaggaaaugcagcaggcuuaggaauaaugggagaauacagaggcacaccaagaaaucaagacuuauacgaugcagcaaaagcauacgcagaacaacuaaaagaaaacggaguaauaaacuacucaguauuagauuuaacagcagaagaauuagaagcaauaaaacaucaacuaaauccuaaggauaaugauguagaacucuaaggacuagucccuguucccagagcccacuuuuuuuucuuuuuuugaaauaaaauagccugucuuucagaucuaaaaaaaaaaaaaaaaaaaaaaaaaaaaaaaaaaaaaaaaaaaaaaaaaaaaaaaaaaaaaaaaugcaucccccccccccccccccccccccccccccccaaaggcucuuuucagagccaccagaauu

SEQ ID NO: 20349 - RNA, 1474 nt, Artificial Sequence
  mRNA product Design d-1 comprising derived and/or modified sequence from HRSV(Memphis-37)__AIY60635.1__N (opt11)
gggagacccgugacccggaaguuguacggcuacgcgacuuucccucccacaaacccucgcgcccuuccuuuccuacuugggcccggcagaaagcuuaccauggcccuaagcaaagucaaacucaacgacacacuaaacaaagaccaacuccucagcuccagcaaauacaccauccaacgauccaccggcgacuccauagacacccccaacuacgacguccaaaaacacaucaacaaacuaugcggcaugcuccuaaucacagaagacgccaaccacaaauucaccggagucaucggcaugcucuacgccaugagccgccucggccgagaagacacaaucaaaauacuaagagacgccggcuaccacguaaaagccaacggcguagacguaaccacccaccgccaagacaucaacggcaaagaaaugaaauucgaaguucucacccucgccucacuaaccacggaaauccaaauaaacauugaaaucgaaagcagaaaauccuacaaaaagaugcuaaaagaaaugggcgagguagccccagaauaccgccacgacagccccgacugcggaaugaucauccucugcauugcagcccucgucaucaccaaacuagccgccggcgacagaagcggccuaaccgcaguaauccgccgagccaacaacguacucaaaaacgaaaugaaacgcuacaaaggccuccuccccaaagacaucgccaacagcuucuacgaaguauucgaaaaauacccgcacuucaucgacgucuucguacacuucggcauagcccaaagcagcacacgaggcggcucccgcgucgaaggaauauucgccggccuguucaugaacgcauacggagcgggccaagucaugcuccgcugggguguacuagccaaguccgucaaaaacaucaugcuagggcacgcaagcguacaagccgaaauggaacaaguagucgaagucuacgaauacgcacaaaaacuaggcggcgaagccggcuucuaccacauccuaaacaaccccaaagccucauuacucucccucacccaauuuccucacuucuccagcgucguccucggaaacgccgccggccuaggcauaaugggggaauaccgcggcaccccgcgcaaccaagaccucuacgacgcagcaaaagccuacgcagaacaacuaaaagaaaacggagucaucaacuacagcguacuggaccuaaccgccgaagaacucgaagccauaaaacaccaacucaaccccaaagacaacgacgucgagcucuaaggacuagucccuguucccagagcccacuuuuuuuucuuuuuuugaaauaaaauagccugucuuucagaucuaaaaaaaaaaaaaaaaaaaaaaaaaaaaaaaaaaaaaaaaaaaaaaaaaaaaaaaaaaaaaaaaugcaucccccccccccccccccccccccccccccccaaaggcucuuuucagagccaccagaauu

SEQ ID NO: 20350 - RNA, 1529 nt, Artificial Sequence
  mRNA product Design d-2 comprising derived and/or modified sequence from HRSV(Memphis-37)__AIY60635.1__N (wt)
gggagagcggcucggccauuuugucccagucaguccggaggcugcggcugcagaaguaccgccugcggaguaacugcaaagaagcuuaccauggcucuuagcaaagucaaguugaacgauacacucaacaaagaucaacuucugucauccagcaaauacaccauccaacggagcacaggagauaguauugauacuccuaauuaugaugugcagaaacacaucaacaaguuauguggcauguuauuaaucacagaagaugcuaaucauaaauucacugggguaauagguauguuauaugcuaugucuagauuaggaagagaagacaccauaaaaauacucagagaugcgggauaucauguaaaagcaaauggaguggauguaacaacacaucgucaagacauuaauggaaaagaaaugaaauuugaaguguuaacauuggcaagcuuaacaacugaaauucaaaucaacauugagauagaaucuaggaaauccuacaaaaaaaugcuaaaagaaaugggagagguggcuccagaauacaggcaugacucuccugauuguggaaugauaauauuauguauagcagcauuaguaauaaccaaauuagcagcaggggauagaucuggucuuacugcugugauuaggagagcuaauaauguucuaaaaaaugaaaugaaacguuauaaaggcuuacuaccaaaggauauagccaacagcuucuaugaaguguuugaaaaauauccucacuuuauagauguuuuuguucauuuugguauagcacaaucuucuaccagagguggcaguagaguugaagggauuuuugcaggauuguuuaugaaugccuauggugcagggcaagugauguuacgguggggagucuuagcaaaaucaguuaaaaauauuaugcuaggacaugcuagugugcaagcagaaauggaacaaguuguggaaguuuaugaauaugcccaaaaauuggguggagaagcaggauucuaccauauauugaacaauccaaaagcaucauuauuaucuuugacucaauuuccccacuucuccaguguaguauugggcaaugcugcuggccuaggcauaaugggagaauacagagguacaccaaggaaucaagaucuauaugaugcugcaaaggcauaugcugaacaacucaaagaaaauggugugauuaacuacaguguauuagacuugacagcagaagaacuagaggcuaucaaacaucagcuuaauccaaaagauaaugauguagagcuuugaggacuaguaauaaggaaacuguaugaaugucugugggcaggaagugaagagauccuucuguaaagguuuuuggaauuaugucugcugaauaauaaacuuuuuugaaauaauaaaucugguagaaaaaugagaucuaaaaaaaaaaaaaaaaaaaaaaaaaaaaaaaaaaaaaaaaaaaaaaaaaaaaaaaaaaaaaaaaugcaucccccccccccccccccccccccccccccccaaaggcucuuuucagagccaccagaauu

SEQ ID NO: 20351 - RNA, 1529 nt, Artificial Sequence
  mRNA product Design d-2 comprising derived and/or modified sequence from HRSV(Memphis-37)__AIY60635.1__N (opt1)
gggagagcggcucggccauuuugucccagucaguccggaggcugcggcugcagaaguaccgccugcggaguaacugcaaagaagcuuaccauggcccugagcaaggugaagcucaacgacacccugaacaaggaccagcugcucuccagcuccaaguacaccauccagcgcagcaccggcgacuccaucgacacccccaacuacgacguccagaagcacaucaacaagcugugcgggaugcugcucaucaccgaggacgccaaccacaaguucaccggcgugaucgggaugcuguacgcgaugagccggcugggccgcgaggacacgaucaagauccuccgggacgccggguaccacgugaaggccaacggcgucgacgugaccacccaccgccaggacaucaacggcaaggagaugaaguucgaggugcugacccuggccucccucacgaccgagauccagaucaacaucgagaucgagagccggaaguccuacaagaagaugcugaaggagaugggggaggucgccccggaguaccgccacgacagccccgacugcggcaugaucauccugugcaucgcggcccucgugaucaccaagcuggccgccggggaccgguccggccugaccgcggugauccgccgggccaacaacguccucaagaacgagaugaagcgcuacaaggggcugcugcccaaggacaucgccaacagcuucuacgagguguucgagaaguacccccacuucaucgacguguucguccacuucggcaucgcccaguccagcacgcggggcgggucccgcguggagggcaucuucgccgggcuguucaugaacgcguacggcgccggccaggugaugcugcgguggggcguccuggccaagagcgugaagaacaucaugcucgggcacgccuccgugcaggccgagauggagcaggucguggagguguacgaguacgcgcagaagcucgggggcgaggccggguucuaccacauccugaacaacccgaaggccagccuccugucccugacccaguucccccacuucagcagcgucgugcucggcaacgccgccggccuggggaucaugggcgaguaccgcgggacgccccggaaccaggaccuguacgacgcggccaaggccuacgccgagcagcucaaggagaacggcgugaucaacuacuccguccuggaccugaccgccgaggagcucgaggcgaucaagcaccagcugaaccccaaggacaacgacguggagcugugaggacuaguaauaaggaaacuguaugaaugucugugggcaggaagugaagagauccuucuguaaagguuuuuggaauuaugucugcugaauaauaaacuuuuuugaaauaauaaaucugguagaaaaaugagaucuaaaaaaaaaaaaaaaaaaaaaaaaaaaaaaaaaaaaaaaaaaaaaaaaaaaaaaaaaaaaaaaaugcaucccccccccccccccccccccccccccccccaaaggcucuuuucagagccaccagaauu

SEQ ID NO: 20352 - RNA, 1529 nt, Artificial Sequence
  mRNA product Design d-2 comprising derived and/or modified sequence from HRSV(Memphis-37)__AIY60635.1__N (opt2)
gggagagcggcucggccauuuugucccagucaguccggaggcugcggcugcagaaguaccgccugcggaguaacugcaaagaagcuuaccauggcccucuccaaggucaagcucaacgacacccucaacaaggaccagcuccucuccuccuccaaguacaccauccagcgcuccaccggcgacuccaucgacacccccaacuacgacguccagaagcacaucaacaagcucugcggcaugcuccucaucaccgaggacgccaaccacaaguucaccggcgucaucggcaugcucuacgccaugucccgccucggccgcgaggacaccaucaagauccuccgcgacgccggcuaccacgucaaggccaacggcgucgacgucaccacccaccgccaggacaucaacggcaaggagaugaaguucgagguccucacccucgccucccucaccaccgagauccagaucaacaucgagaucgagucccgcaaguccuacaagaagaugcucaaggagaugggcgaggucgcccccgaguaccgccacgacucccccgacugcggcaugaucauccucugcaucgccgcccucgucaucaccaagcucgccgccggcgaccgcuccggccucaccgccgucauccgccgcgccaacaacguccucaagaacgagaugaagcgcuacaagggccuccuccccaaggacaucgccaacuccuucuacgaggucuucgagaaguacccccacuucaucgacgucuucguccacuucggcaucgcccaguccuccacccgcggcggcucccgcgucgagggcaucuucgccggccucuucaugaacgccuacggcgccggccaggucaugcuccgcuggggcguccucgccaaguccgucaagaacaucaugcucggccacgccuccguccaggccgagauggagcaggucgucgaggucuacgaguacgcccagaagcucggcggcgaggccggcuucuaccacauccucaacaaccccaaggccucccuccucucccucacccaguucccccacuucuccuccgucguccucggcaacgccgccggccucggcaucaugggcgaguaccgcggcaccccccgcaaccaggaccucuacgacgccgccaaggccuacgccgagcagcucaaggagaacggcgucaucaacuacuccguccucgaccucaccgccgaggagcucgaggccaucaagcaccagcucaaccccaaggacaacgacgucgagcucugaggacuaguaauaaggaaacuguaugaaugucugugggcaggaagugaagagauccuucuguaaagguuuuuggaauuaugucugcugaauaauaaacuuuuuugaaauaauaaaucugguagaaaaaugagaucuaaaaaaaaaaaaaaaaaaaaaaaaaaaaaaaaaaaaaaaaaaaaaaaaaaaaaaaaaaaaaaaaugcaucccccccccccccccccccccccccccccccaaaggcucuuuucagagccaccagaauu

SEQ ID NO: 20353 - RNA, 1529 nt, Artificial Sequence
  mRNA product Design d-2 comprising derived and/or modified sequence from HRSV(Memphis-37)__AIY60635.1__N (opt3)
gggagagcggcucggccauuuugucccagucaguccggaggcugcggcugcagaaguaccgccugcggaguaacugcaaagaagcuuaccauggcccugagcaaggugaaacucaacgacacccuuaauaaggaucagcuguuguccucuucaaaauacacaauccaaagaaguacuggcgacagcauugauacgcccaacuaugacguccagaagcacauaaauaaauuaugcgggaugcugcuaaucaccgaggaugcuaaccauaaguucacaggaguuauugguaugcucuacgcaauguccaggcugggccgggaagacacuaucaagauucuucgcgaugccggguaucacgugaaagcgaauggaguagacgugaccacacaucgacaggauaucaacggcaaggagaugaaauuugaaguccugaccuuggcuucucucacuacagagauacagaucaauauugaaaucgagucgcguaagucauacaaaaagaugcugaaggagaugggugaaguggccccugaguauagacacgacagcccagauugugggaugauuauccugugcauagcagcccucguuauuaccaaauuagcugcaggagacaggaguggccugacggccgugauccggcgcgcuaacaauguccuuaagaacgaaaugaaaagauacaagggcuugcugccgaaagauauugccaauuccuucuaugagguguuugagaaguacccccauuucaucgacguauuuguucacuucgggaucgcgcaaucuagcacuaggggagguucccggguggaaggcauuuuugcagggcuauucaugaacgccuacggagcuggccaggucaugcuccgcuggggugugcuggccaaaucagugaagaauauaaugcuugggcacgcaaguguccaggcugagauggaacagguuguggagguauaugaauacgcccaaaagcugggaggcgaggcgggcuuuuaucauaucuugaacaauccuaaagccagccuccugucuuuaacccaguucccacacuuuuccucagugguccuggggaacgcagcuggacucgguauuaugggcgaguaccgagggacacccagaaaccaggaccuuuaugaugccgcuaaggccuacgcagaacagcugaaagagaauggagugaucaacuauagcguuuuggaccuaacugccgaggaacuggaagcuauaaagcaucaacucaauccuaaagauaacgacguggagcugugaggacuaguaauaaggaaacuguaugaaugucugugggcaggaagugaagagauccuucuguaaagguuuuuggaauuaugucugcugaauaauaaacuuuuuugaaauaauaaaucugguagaaaaaugagaucuaaaaaaaaaaaaaaaaaaaaaaaaaaaaaaaaaaaaaaaaaaaaaaaaaaaaaaaaaaaaaaaaugcaucccccccccccccccccccccccccccccccaaaggcucuuuucagagccaccagaauu

SEQ ID NO: 20354 - RNA, 1529 nt, Artificial Sequence
  mRNA product Design d-2 comprising derived and/or modified sequence from HRSV(Memphis-37)__AIY60635.1__N (opt4)
gggagagcggcucggccauuuugucccagucaguccggaggcugcggcugcagaaguaccgccugcggaguaacugcaaagaagcuuaccauggcccugagcaaggugaagcugaacgacacccugaacaaggaccagcugcugagcagcagcaaguacaccauccagagaagcaccggcgacagcaucgacacccccaacuacgacgugcagaagcacaucaacaagcugugcggcaugcugcugaucaccgaggacgccaaccacaaguucaccggcgugaucggcaugcuguacgccaugagcagacugggcagagaggacaccaucaagauccugagagacgccggcuaccacgugaaggccaacggcguggacgugaccacccacagacaggacaucaacggcaaggagaugaaguucgaggugcugacccuggccagccugaccaccgagauccagaucaacaucgagaucgagagcagaaagagcuacaagaagaugcugaaggagaugggcgagguggcccccgaguacagacacgacagccccgacugcggcaugaucauccugugcaucgccgcccuggugaucaccaagcuggccgccggcgacagaagcggccugaccgccgugaucagaagagccaacaacgugcugaagaacgagaugaagagauacaagggccugcugcccaaggacaucgccaacagcuucuacgagguguucgagaaguacccccacuucaucgacguguucgugcacuucggcaucgcccagagcagcaccagaggcggcagcagaguggagggcaucuucgccggccuguucaugaacgccuacggcgccggccaggugaugcugagauggggcgugcuggccaagagcgugaagaacaucaugcugggccacgccagcgugcaggccgagauggagcaggugguggagguguacgaguacgcccagaagcugggcggcgaggccggcuucuaccacauccugaacaaccccaaggccagccugcugagccugacccaguucccccacuucagcagcguggugcugggcaacgccgccggccugggcaucaugggcgaguacagaggcacccccagaaaccaggaccuguacgacgccgccaaggccuacgccgagcagcugaaggagaacggcgugaucaacuacagcgugcuggaccugaccgccgaggagcuggaggccaucaagcaccagcugaaccccaaggacaacgacguggagcugugaggacuaguaauaaggaaacuguaugaaugucugugggcaggaagugaagagauccuucuguaaagguuuuuggaauuaugucugcugaauaauaaacuuuuuugaaauaauaaaucugguagaaaaaugagaucuaaaaaaaaaaaaaaaaaaaaaaaaaaaaaaaaaaaaaaaaaaaaaaaaaaaaaaaaaaaaaaaaugcaucccccccccccccccccccccccccccccccaaaggcucuuuucagagccaccagaauu

SEQ ID NO: 20355 - RNA, 1529 nt, Artificial Sequence
  mRNA product Design d-2 comprising derived and/or modified sequence from HRSV(Memphis-37)__AIY60635.1__N (opt5)
gggagagcggcucggccauuuugucccagucaguccggaggcugcggcugcagaaguaccgccugcggaguaacugcaaagaagcuuaccauggcccugagcaaggugaaacucaacgacacccugaauaaggaucagcuucuguccucuagcaaauacacaauccaaagauccacgggcgacucuauugauacccccaacuaugacguccagaagcacaucaauaaacucugcgggaugcugcuuauuacagaggaugcuaaccauaaguucaccggaguuaucggcaugcuguacgccaugagccggcucgggcgcgaagacacaauuaagauccugagagaugcgggauaucacgugaaagcuaauggcguggacgucaccacacaucggcaggauaucaacgggaaggagaugaaauuugaagugcugacccucgccucccugacgaccgagauucagaucaauauugaaaucgagucucgcaagagcuacaaaaagaugcuuaaggagaugggagaaguugccccugaguauagacacgacuccccggauuguggcaugauuauccugugcauugcugcccucgugaucacaaaacuggcugccggcgaccggagcgggcuuaccgcggucauccgcagagccaacaaugugcugaagaacgaaaugaaacgguacaagggacuccugcccaaagauauugcuaauucuuucuaugagguuuuugagaaguacccucauuucaucgacguguuuguccacuucggcauugcccaauccagcacacgcgggggaucuagaguggaaggcaucuuugcugggcuguucaugaacgccuacggagcgggccaggugaugcuccgguggggcguccuggccaaauccguuaagaauauuaugcuugggcacgcuagcgugcaggccgagauggaacagguggucgagguguaugaauacgcucaaaagcugggaggcgaggccggguuuuaucauauccucaacaaucccaaagccucucugcuuucccugacccaguucccucacuuuagcuccguugugcucggaaacgcugcgggccuggggaucaugggagaguaccgcggcacgcccagaaaccaggaccuguaugaugccgcuaaggccuacgccgaacagcucaaagagaauggcgucauuaacuauucugugcuggaccuuacagcugaggaacuggaagccaucaagcaucaacucaauccuaaagauaacgacguugagcugugaggacuaguaauaaggaaacuguaugaaugucugugggcaggaagugaagagauccuucuguaaagguuuuuggaauuaugucugcugaauaauaaacuuuuuugaaauaauaaaucugguagaaaaaugagaucuaaaaaaaaaaaaaaaaaaaaaaaaaaaaaaaaaaaaaaaaaaaaaaaaaaaaaaaaaaaaaaaaugcaucccccccccccccccccccccccccccccccaaaggcucuuuucagagccaccagaauu

SEQ ID NO: 20356 - RNA, 1529 nt, Artificial Sequence
  mRNA product Design d-2 comprising derived and/or modified sequence from HRSV(Memphis-37)__AIY60635.1__N (opt6)
gggagagcggcucggccauuuugucccagucaguccggaggcugcggcugcagaaguaccgccugcggaguaacugcaaagaagcuuaccauggccuuaaguaaaguaaaauuaaacgacacacuaaacaaagaccaauuacucucaucaucgaaauauacaauacaaagauccacaggagacuccauagauacaccaaauuacgacguacaaaaacauauaaacaaacucugcggaauguuauuaauaacagaagacgcaaaccacaaauucacaggagucauagguaugcuauacgcaaugucaagauuaggaagagaagauacaauaaaaauacuaagagacgcaggauaccacguaaaagcaaacggaguagacguaacaacacauagacaagauauaaacgguaaagaaaugaaauucgaaguacuaacacuagccagucuaacaacagaaauacaaauaaacauagaaauagaaagccgaaaaucauacaaaaaaauguuaaaagaaaugggggaaguagcacccgaauacagacaugauucaccugacugcggaaugauaauacucugcauagcggcauuagucauaacaaaacuagccgcaggagacagaagcggauuaacagcaguaauaagaagagcaaauaauguauuaaaaaaugaaaugaaaagguauaaaggauuacuaccaaaagauauagcaaacucauucuaugaaguuuucgaaaaauacccacacuucauagacgucuucguacacuuuggaauagcacaaagcagcacaagaggaggaagcagaguagaaggaauauucgcaggacuauucaugaaugcauacggagccggacaaguaaugcuaagauggggaguuuuagcaaaaagcguaaaaaacauaauguuaggacacgccuccguccaagccgaaauggaacaaguaguagaaguauacgaauaugcacaaaaacuaggaggagaagcaggauucuaucacauacucaauaacccaaaagcaucacuauugagcuuaacacaauucccacauuuuucauccguaguccuaggaaaugcagcaggcuuaggaauaaugggagaauacagaggcacaccaagaaaucaagacuuauacgaugcagcaaaagcauacgcagaacaacuaaaagaaaacggaguaauaaacuacucaguauuagauuuaacagcagaagaauuagaagcaauaaaacaucaacuaaauccuaaggauaaugauguagaacucuaaggacuaguaauaaggaaacuguaugaaugucugugggcaggaagugaagagauccuucuguaaagguuuuuggaauuaugucugcugaauaauaaacuuuuuugaaauaauaaaucugguagaaaaaugagaucuaaaaaaaaaaaaaaaaaaaaaaaaaaaaaaaaaaaaaaaaaaaaaaaaaaaaaaaaaaaaaaaaugcaucccccccccccccccccccccccccccccccaaaggcucuuuucagagccaccagaauu

SEQ ID NO: 20357 - RNA, 1529 nt, Artificial Sequence
  mRNA product Design d-2 comprising derived and/or modified sequence from HRSV(Memphis-37)__AIY60635.1__N (opt11)
gggagagcggcucggccauuuugucccagucaguccggaggcugcggcugcagaaguaccgccugcggaguaacugcaaagaagcuuaccauggcccuaagcaaagucaaacucaacgacacacuaaacaaagaccaacuccucagcuccagcaaauacaccauccaacgauccaccggcgacuccauagacacccccaacuacgacguccaaaaacacaucaacaaacuaugcggcaugcuccuaaucacagaagacgccaaccacaaauucaccggagucaucggcaugcucuacgccaugagccgccucggccgagaagacacaaucaaaauacuaagagacgccggcuaccacguaaaagccaacggcguagacguaaccacccaccgccaagacaucaacggcaaagaaaugaaauucgaaguucucacccucgccucacuaaccacggaaauccaaauaaacauugaaaucgaaagcagaaaauccuacaaaaagaugcuaaaagaaaugggcgagguagccccagaauaccgccacgacagccccgacugcggaaugaucauccucugcauugcagcccucgucaucaccaaacuagccgccggcgacagaagcggccuaaccgcaguaauccgccgagccaacaacguacucaaaaacgaaaugaaacgcuacaaaggccuccuccccaaagacaucgccaacagcuucuacgaaguauucgaaaaauacccgcacuucaucgacgucuucguacacuucggcauagcccaaagcagcacacgaggcggcucccgcgucgaaggaauauucgccggccuguucaugaacgcauacggagcgggccaagucaugcuccgcugggguguacuagccaaguccgucaaaaacaucaugcuagggcacgcaagcguacaagccgaaauggaacaaguagucgaagucuacgaauacgcacaaaaacuaggcggcgaagccggcuucuaccacauccuaaacaaccccaaagccucauuacucucccucacccaauuuccucacuucuccagcgucguccucggaaacgccgccggccuaggcauaaugggggaauaccgcggcaccccgcgcaaccaagaccucuacgacgcagcaaaagccuacgcagaacaacuaaaagaaaacggagucaucaacuacagcguacuggaccuaaccgccgaagaacucgaagccauaaaacaccaacucaaccccaaagacaacgacgucgagcucuaaggacuaguaauaaggaaacuguaugaaugucugugggcaggaagugaagagauccuucuguaaagguuuuuggaauuaugucugcugaauaauaaacuuuuuugaaauaauaaaucugguagaaaaaugagaucuaaaaaaaaaaaaaaaaaaaaaaaaaaaaaaaaaaaaaaaaaaaaaaaaaaaaaaaaaaaaaaaaugcaucccccccccccccccccccccccccccccccaaaggcucuuuucagagccaccagaauu

SEQ ID NO: 20358 - RNA, 1845 nt, Artificial Sequence
  mRNA product Design d-3 comprising derived and/or modified sequence from HRSV(Memphis-37)__AIY60635.1__N (wt)
gggagagggcgcuuggcuugcaaggacccugagcugcggcauugaagcacacccaacccaacucgacugaagucagccucacugaaccggaucugagaaucuucucucucugggcuugccagggcucuccgaaccuagcuagcauccucuucaauuccaacuagaaagcuuaccauggcucuuagcaaagucaaguugaacgauacacucaacaaagaucaacuucugucauccagcaaauacaccauccaacggagcacaggagauaguauugauacuccuaauuaugaugugcagaaacacaucaacaaguuauguggcauguuauuaaucacagaagaugcuaaucauaaauucacugggguaauagguauguuauaugcuaugucuagauuaggaagagaagacaccauaaaaauacucagagaugcgggauaucauguaaaagcaaauggaguggauguaacaacacaucgucaagacauuaauggaaaagaaaugaaauuugaaguguuaacauuggcaagcuuaacaacugaaauucaaaucaacauugagauagaaucuaggaaauccuacaaaaaaaugcuaaaagaaaugggagagguggcuccagaauacaggcaugacucuccugauuguggaaugauaauauuauguauagcagcauuaguaauaaccaaauuagcagcaggggauagaucuggucuuacugcugugauuaggagagcuaauaauguucuaaaaaaugaaaugaaacguuauaaaggcuuacuaccaaaggauauagccaacagcuucuaugaaguguuugaaaaauauccucacuuuauagauguuuuuguucauuuugguauagcacaaucuucuaccagagguggcaguagaguugaagggauuuuugcaggauuguuuaugaaugccuauggugcagggcaagugauguuacgguggggagucuuagcaaaaucaguuaaaaauauuaugcuaggacaugcuagugugcaagcagaaauggaacaaguuguggaaguuuaugaauaugcccaaaaauuggguggagaagcaggauucuaccauauauugaacaauccaaaagcaucauuauuaucuuugacucaauuuccccacuucuccaguguaguauugggcaaugcugcuggccuaggcauaaugggagaauacagagguacaccaaggaaucaagaucuauaugaugcugcaaaggcauaugcugaacaacucaaagaaaauggugugauuaacuacaguguauuagacuugacagcagaagaacuagaggcuaucaaacaucagcuuaauccaaaagauaaugauguagagcuuugaggacuagugaagggaacacccaaauuuaauucagccuuaagcacaauuaauuaagagugaaacguaauuguacaagcaguuggucacccaccauagggcaugaucaacaccgcaaccuuuccuuuuucccccagugauucugaaaaaccccucuucccuucagcuugcuuagauguuccaaauuuaguaagcuuaaggcggccuacagaagaaaaagaaaaaaaaggccacaaaaguucccucucacuuucaguaaauaaaauaaaagcagcaacagaaauaaagaaauaaaugaaauucaaaaugaaauaaauauuguguugugcagcauuaaaaaaucaauaaaaauuaaaaaugagcaagaucuaaaaaaaaaaaaaaaaaaaaaaaaaaaaaaaaaaaaaaaaaaaaaaaaaaaaaaaaaaaaaaaaugcaucccccccccccccccccccccccccccccccaaaggcucuuuucagagccaccagaauu

SEQ ID NO: 20359 - RNA, 1845 nt, Artificial Sequence
  mRNA product Design d-3 comprising derived and/or modified sequence from HRSV(Memphis-37)__AIY60635.1__N (opt1)
gggagagggcgcuuggcuugcaaggacccugagcugcggcauugaagcacacccaacccaacucgacugaagucagccucacugaaccggaucugagaaucuucucucucugggcuugccagggcucuccgaaccuagcuagcauccucuucaauuccaacuagaaagcuuaccauggcccugagcaaggugaagcucaacgacacccugaacaaggaccagcugcucuccagcuccaaguacaccauccagcgcagcaccggcgacuccaucgacacccccaacuacgacguccagaagcacaucaacaagcugugcgggaugcugcucaucaccgaggacgccaaccacaaguucaccggcgugaucgggaugcuguacgcgaugagccggcugggccgcgaggacacgaucaagauccuccgggacgccggguaccacgugaaggccaacggcgucgacgugaccacccaccgccaggacaucaacggcaaggagaugaaguucgaggugcugacccuggccucccucacgaccgagauccagaucaacaucgagaucgagagccggaaguccuacaagaagaugcugaaggagaugggggaggucgccccggaguaccgccacgacagccccgacugcggcaugaucauccugugcaucgcggcccucgugaucaccaagcuggccgccggggaccgguccggccugaccgcggugauccgccgggccaacaacguccucaagaacgagaugaagcgcuacaaggggcugcugcccaaggacaucgccaacagcuucuacgagguguucgagaaguacccccacuucaucgacguguucguccacuucggcaucgcccaguccagcacgcggggcgggucccgcguggagggcaucuucgccgggcuguucaugaacgcguacggcgccggccaggugaugcugcgguggggcguccuggccaagagcgugaagaacaucaugcucgggcacgccuccgugcaggccgagauggagcaggucguggagguguacgaguacgcgcagaagcucgggggcgaggccggguucuaccacauccugaacaacccgaaggccagccuccugucccugacccaguucccccacuucagcagcgucgugcucggcaacgccgccggccuggggaucaugggcgaguaccgcgggacgccccggaaccaggaccuguacgacgcggccaaggccuacgccgagcagcucaaggagaacggcgugaucaacuacuccguccuggaccugaccgccgaggagcucgaggcgaucaagcaccagcugaaccccaaggacaacgacguggagcugugaggacuagugaagggaacacccaaauuuaauucagccuuaagcacaauuaauuaagagugaaacguaauuguacaagcaguuggucacccaccauagggcaugaucaacaccgcaaccuuuccuuuuucccccagugauucugaaaaaccccucuucccuucagcuugcuuagauguuccaaauuuaguaagcuuaaggcggccuacagaagaaaaagaaaaaaaaggccacaaaaguucccucucacuuucaguaaauaaaauaaaagcagcaacagaaauaaagaaauaaaugaaauucaaaaugaaauaaauauuguguugugcagcauuaaaaaaucaauaaaaauuaaaaaugagcaagaucuaaaaaaaaaaaaaaaaaaaaaaaaaaaaaaaaaaaaaaaaaaaaaaaaaaaaaaaaaaaaaaaaugcaucccccccccccccccccccccccccccccccaaaggcucuuuucagagccaccagaauu

SEQ ID NO: 20360 - RNA, 1845 nt, Artificial Sequence
  mRNA product Design d-3 comprising derived and/or modified sequence from HRSV(Memphis-37)__AIY60635.1__N (opt2)
gggagagggcgcuuggcuugcaaggacccugagcugcggcauugaagcacacccaacccaacucgacugaagucagccucacugaaccggaucugagaaucuucucucucugggcuugccagggcucuccgaaccuagcuagcauccucuucaauuccaacuagaaagcuuaccauggcccucuccaaggucaagcucaacgacacccucaacaaggaccagcuccucuccuccuccaaguacaccauccagcgcuccaccggcgacuccaucgacacccccaacuacgacguccagaagcacaucaacaagcucugcggcaugcuccucaucaccgaggacgccaaccacaaguucaccggcgucaucggcaugcucuacgccaugucccgccucggccgcgaggacaccaucaagauccuccgcgacgccggcuaccacgucaaggccaacggcgucgacgucaccacccaccgccaggacaucaacggcaaggagaugaaguucgagguccucacccucgccucccucaccaccgagauccagaucaacaucgagaucgagucccgcaaguccuacaagaagaugcucaaggagaugggcgaggucgcccccgaguaccgccacgacucccccgacugcggcaugaucauccucugcaucgccgcccucgucaucaccaagcucgccgccggcgaccgcuccggccucaccgccgucauccgccgcgccaacaacguccucaagaacgagaugaagcgcuacaagggccuccuccccaaggacaucgccaacuccuucuacgaggucuucgagaaguacccccacuucaucgacgucuucguccacuucggcaucgcccaguccuccacccgcggcggcucccgcgucgagggcaucuucgccggccucuucaugaacgccuacggcgccggccaggucaugcuccgcuggggcguccucgccaaguccgucaagaacaucaugcucggccacgccuccguccaggccgagauggagcaggucgucgaggucuacgaguacgcccagaagcucggcggcgaggccggcuucuaccacauccucaacaaccccaaggccucccuccucucccucacccaguucccccacuucuccuccgucguccucggcaacgccgccggccucggcaucaugggcgaguaccgcggcaccccccgcaaccaggaccucuacgacgccgccaaggccuacgccgagcagcucaaggagaacggcgucaucaacuacuccguccucgaccucaccgccgaggagcucgaggccaucaagcaccagcucaaccccaaggacaacgacgucgagcucugaggacuagugaagggaacacccaaauuuaauucagccuuaagcacaauuaauuaagagugaaacguaauuguacaagcaguuggucacccaccauagggcaugaucaacaccgcaaccuuuccuuuuucccccagugauucugaaaaaccccucuucccuucagcuugcuuagauguuccaaauuuaguaagcuuaaggcggccuacagaagaaaaagaaaaaaaaggccacaaaaguucccucucacuuucaguaaauaaaauaaaagcagcaacagaaauaaagaaauaaaugaaauucaaaaugaaauaaauauuguguugugcagcauuaaaaaaucaauaaaaauuaaaaaugagcaagaucuaaaaaaaaaaaaaaaaaaaaaaaaaaaaaaaaaaaaaaaaaaaaaaaaaaaaaaaaaaaaaaaaugcaucccccccccccccccccccccccccccccccaaaggcucuuuucagagccaccagaauu

SEQ ID NO: 20361 - RNA, 1845 nt, Artificial Sequence
  mRNA product Design d-3 comprising derived and/or modified sequence from HRSV(Memphis-37)__AIY60635.1__N (opt3)
gggagagggcgcuuggcuugcaaggacccugagcugcggcauugaagcacacccaacccaacucgacugaagucagccucacugaaccggaucugagaaucuucucucucugggcuugccagggcucuccgaaccuagcuagcauccucuucaauuccaacuagaaagcuuaccauggcccugagcaaggugaaacucaacgacacccuuaauaaggaucagcuguuguccucuucaaaauacacaauccaaagaaguacuggcgacagcauugauacgcccaacuaugacguccagaagcacauaaauaaauuaugcgggaugcugcuaaucaccgaggaugcuaaccauaaguucacaggaguuauugguaugcucuacgcaauguccaggcugggccgggaagacacuaucaagauucuucgcgaugccggguaucacgugaaagcgaauggaguagacgugaccacacaucgacaggauaucaacggcaaggagaugaaauuugaaguccugaccuuggcuucucucacuacagagauacagaucaauauugaaaucgagucgcguaagucauacaaaaagaugcugaaggagaugggugaaguggccccugaguauagacacgacagcccagauugugggaugauuauccugugcauagcagcccucguuauuaccaaauuagcugcaggagacaggaguggccugacggccgugauccggcgcgcuaacaauguccuuaagaacgaaaugaaaagauacaagggcuugcugccgaaagauauugccaauuccuucuaugagguguuugagaaguacccccauuucaucgacguauuuguucacuucgggaucgcgcaaucuagcacuaggggagguucccggguggaaggcauuuuugcagggcuauucaugaacgccuacggagcuggccaggucaugcuccgcuggggugugcuggccaaaucagugaagaauauaaugcuugggcacgcaaguguccaggcugagauggaacagguuguggagguauaugaauacgcccaaaagcugggaggcgaggcgggcuuuuaucauaucuugaacaauccuaaagccagccuccugucuuuaacccaguucccacacuuuuccucagugguccuggggaacgcagcuggacucgguauuaugggcgaguaccgagggacacccagaaaccaggaccuuuaugaugccgcuaaggccuacgcagaacagcugaaagagaauggagugaucaacuauagcguuuuggaccuaacugccgaggaacuggaagcuauaaagcaucaacucaauccuaaagauaacgacguggagcugugaggacuagugaagggaacacccaaauuuaauucagccuuaagcacaauuaauuaagagugaaacguaauuguacaagcaguuggucacccaccauagggcaugaucaacaccgcaaccuuuccuuuuucccccagugauucugaaaaaccccucuucccuucagcuugcuuagauguuccaaauuuaguaagcuuaaggcggccuacagaagaaaaagaaaaaaaaggccacaaaaguucccucucacuuucaguaaauaaaauaaaagcagcaacagaaauaaagaaauaaaugaaauucaaaaugaaauaaauauuguguugugcagcauuaaaaaaucaauaaaaauuaaaaaugagcaagaucuaaaaaaaaaaaaaaaaaaaaaaaaaaaaaaaaaaaaaaaaaaaaaaaaaaaaaaaaaaaaaaaaugcaucccccccccccccccccccccccccccccccaaaggcucuuuucagagccaccagaauu

SEQ ID NO: 20362 - RNA, 1845 nt, Artificial Sequence
  mRNA product Design d-3 comprising derived and/or modified sequence from HRSV(Memphis-37)__AIY60635.1__N (opt4)
gggagagggcgcuuggcuugcaaggacccugagcugcggcauugaagcacacccaacccaacucgacugaagucagccucacugaaccggaucugagaaucuucucucucugggcuugccagggcucuccgaaccuagcuagcauccucuucaauuccaacuagaaagcuuaccauggcccugagcaaggugaagcugaacgacacccugaacaaggaccagcugcugagcagcagcaaguacaccauccagagaagcaccggcgacagcaucgacacccccaacuacgacgugcagaagcacaucaacaagcugugcggcaugcugcugaucaccgaggacgccaaccacaaguucaccggcgugaucggcaugcuguacgccaugagcagacugggcagagaggacaccaucaagauccugagagacgccggcuaccacgugaaggccaacggcguggacgugaccacccacagacaggacaucaacggcaaggagaugaaguucgaggugcugacccuggccagccugaccaccgagauccagaucaacaucgagaucgagagcagaaagagcuacaagaagaugcugaaggagaugggcgagguggcccccgaguacagacacgacagccccgacugcggcaugaucauccugugcaucgccgcccuggugaucaccaagcuggccgccggcgacagaagcggccugaccgccgugaucagaagagccaacaacgugcugaagaacgagaugaagagauacaagggccugcugcccaaggacaucgccaacagcuucuacgagguguucgagaaguacccccacuucaucgacguguucgugcacuucggcaucgcccagagcagcaccagaggcggcagcagaguggagggcaucuucgccggccuguucaugaacgccuacggcgccggccaggugaugcugagauggggcgugcuggccaagagcgugaagaacaucaugcugggccacgccagcgugcaggccgagauggagcaggugguggagguguacgaguacgcccagaagcugggcggcgaggccggcuucuaccacauccugaacaaccccaaggccagccugcugagccugacccaguucccccacuucagcagcguggugcugggcaacgccgccggccugggcaucaugggcgaguacagaggcacccccagaaaccaggaccuguacgacgccgccaaggccuacgccgagcagcugaaggagaacggcgugaucaacuacagcgugcuggaccugaccgccgaggagcuggaggccaucaagcaccagcugaaccccaaggacaacgacguggagcugugaggacuagugaagggaacacccaaauuuaauucagccuuaagcacaauuaauuaagagugaaacguaauuguacaagcaguuggucacccaccauagggcaugaucaacaccgcaaccuuuccuuuuucccccagugauucugaaaaaccccucuucccuucagcuugcuuagauguuccaaauuuaguaagcuuaaggcggccuacagaagaaaaagaaaaaaaaggccacaaaaguucccucucacuuucaguaaauaaaauaaaagcagcaacagaaauaaagaaauaaaugaaauucaaaaugaaauaaauauuguguugugcagcauuaaaaaaucaauaaaaauuaaaaaugagcaagaucuaaaaaaaaaaaaaaaaaaaaaaaaaaaaaaaaaaaaaaaaaaaaaaaaaaaaaaaaaaaaaaaaugcaucccccccccccccccccccccccccccccccaaaggcucuuuucagagccaccagaauu

SEQ ID NO: 20363 - RNA, 1845 nt, Artificial Sequence
  mRNA product Design d-3 comprising derived and/or modified sequence from HRSV(Memphis-37)__AIY60635.1__N (opt5)
gggagagggcgcuuggcuugcaaggacccugagcugcggcauugaagcacacccaacccaacucgacugaagucagccucacugaaccggaucugagaaucuucucucucugggcuugccagggcucuccgaaccuagcuagcauccucuucaauuccaacuagaaagcuuaccauggcccugagcaaggugaaacucaacgacacccugaauaaggaucagcuucuguccucuagcaaauacacaauccaaagauccacgggcgacucuauugauacccccaacuaugacguccagaagcacaucaauaaacucugcgggaugcugcuuauuacagaggaugcuaaccauaaguucaccggaguuaucggcaugcuguacgccaugagccggcucgggcgcgaagacacaauuaagauccugagagaugcgggauaucacgugaaagcuaauggcguggacgucaccacacaucggcaggauaucaacgggaaggagaugaaauuugaagugcugacccucgccucccugacgaccgagauucagaucaauauugaaaucgagucucgcaagagcuacaaaaagaugcuuaaggagaugggagaaguugccccugaguauagacacgacuccccggauuguggcaugauuauccugugcauugcugcccucgugaucacaaaacuggcugccggcgaccggagcgggcuuaccgcggucauccgcagagccaacaaugugcugaagaacgaaaugaaacgguacaagggacuccugcccaaagauauugcuaauucuuucuaugagguuuuugagaaguacccucauuucaucgacguguuuguccacuucggcauugcccaauccagcacacgcgggggaucuagaguggaaggcaucuuugcugggcuguucaugaacgccuacggagcgggccaggugaugcuccgguggggcguccuggccaaauccguuaagaauauuaugcuugggcacgcuagcgugcaggccgagauggaacagguggucgagguguaugaauacgcucaaaagcugggaggcgaggccggguuuuaucauauccucaacaaucccaaagccucucugcuuucccugacccaguucccucacuuuagcuccguugugcucggaaacgcugcgggccuggggaucaugggagaguaccgcggcacgcccagaaaccaggaccuguaugaugccgcuaaggccuacgccgaacagcucaaagagaauggcgucauuaacuauucugugcuggaccuuacagcugaggaacuggaagccaucaagcaucaacucaauccuaaagauaacgacguugagcugugaggacuagugaagggaacacccaaauuuaauucagccuuaagcacaauuaauuaagagugaaacguaauuguacaagcaguuggucacccaccauagggcaugaucaacaccgcaaccuuuccuuuuucccccagugauucugaaaaaccccucuucccuucagcuugcuuagauguuccaaauuuaguaagcuuaaggcggccuacagaagaaaaagaaaaaaaaggccacaaaaguucccucucacuuucaguaaauaaaauaaaagcagcaacagaaauaaagaaauaaaugaaauucaaaaugaaauaaauauuguguugugcagcauuaaaaaaucaauaaaaauuaaaaaugagcaagaucuaaaaaaaaaaaaaaaaaaaaaaaaaaaaaaaaaaaaaaaaaaaaaaaaaaaaaaaaaaaaaaaaugcaucccccccccccccccccccccccccccccccaaaggcucuuuucagagccaccagaauu

SEQ ID NO: 20364 - RNA, 1845 nt, Artificial Sequence
  mRNA product Design d-3 comprising derived and/or modified sequence from HRSV(Memphis-37)__AIY60635.1__N (opt6)
gggagagggcgcuuggcuugcaaggacccugagcugcggcauugaagcacacccaacccaacucgacugaagucagccucacugaaccggaucugagaaucuucucucucugggcuugccagggcucuccgaaccuagcuagcauccucuucaauuccaacuagaaagcuuaccauggccuuaaguaaaguaaaauuaaacgacacacuaaacaaagaccaauuacucucaucaucgaaauauacaauacaaagauccacaggagacuccauagauacaccaaauuacgacguacaaaaacauauaaacaaacucugcggaauguuauuaauaacagaagacgcaaaccacaaauucacaggagucauagguaugcuauacgcaaugucaagauuaggaagagaagauacaauaaaaauacuaagagacgcaggauaccacguaaaagcaaacggaguagacguaacaacacauagacaagauauaaacgguaaagaaaugaaauucgaaguacuaacacuagccagucuaacaacagaaauacaaauaaacauagaaauagaaagccgaaaaucauacaaaaaaauguuaaaagaaaugggggaaguagcacccgaauacagacaugauucaccugacugcggaaugauaauacucugcauagcggcauuagucauaacaaaacuagccgcaggagacagaagcggauuaacagcaguaauaagaagagcaaauaauguauuaaaaaaugaaaugaaaagguauaaaggauuacuaccaaaagauauagcaaacucauucuaugaaguuuucgaaaaauacccacacuucauagacgucuucguacacuuuggaauagcacaaagcagcacaagaggaggaagcagaguagaaggaauauucgcaggacuauucaugaaugcauacggagccggacaaguaaugcuaagauggggaguuuuagcaaaaagcguaaaaaacauaauguuaggacacgccuccguccaagccgaaauggaacaaguaguagaaguauacgaauaugcacaaaaacuaggaggagaagcaggauucuaucacauacucaauaacccaaaagcaucacuauugagcuuaacacaauucccacauuuuucauccguaguccuaggaaaugcagcaggcuuaggaauaaugggagaauacagaggcacaccaagaaaucaagacuuauacgaugcagcaaaagcauacgcagaacaacuaaaagaaaacggaguaauaaacuacucaguauuagauuuaacagcagaagaauuagaagcaauaaaacaucaacuaaauccuaaggauaaugauguagaacucuaaggacuagugaagggaacacccaaauuuaauucagccuuaagcacaauuaauuaagagugaaacguaauuguacaagcaguuggucacccaccauagggcaugaucaacaccgcaaccuuuccuuuuucccccagugauucugaaaaaccccucuucccuucagcuugcuuagauguuccaaauuuaguaagcuuaaggcggccuacagaagaaaaagaaaaaaaaggccacaaaaguucccucucacuuucaguaaauaaaauaaaagcagcaacagaaauaaagaaauaaaugaaauucaaaaugaaauaaauauuguguugugcagcauuaaaaaaucaauaaaaauuaaaaaugagcaagaucuaaaaaaaaaaaaaaaaaaaaaaaaaaaaaaaaaaaaaaaaaaaaaaaaaaaaaaaaaaaaaaaaugcaucccccccccccccccccccccccccccccccaaaggcucuuuucagagccaccagaauu

SEQ ID NO: 20365 - RNA, 1845 nt, Artificial Sequence
  mRNA product Design d-3 comprising derived and/or modified sequence from HRSV(Memphis-37)__AIY60635.1__N (opt11)
gggagagggcgcuuggcuugcaaggacccugagcugcggcauugaagcacacccaacccaacucgacugaagucagccucacugaaccggaucugagaaucuucucucucugggcuugccagggcucuccgaaccuagcuagcauccucuucaauuccaacuagaaagcuuaccauggcccuaagcaaagucaaacucaacgacacacuaaacaaagaccaacuccucagcuccagcaaauacaccauccaacgauccaccggcgacuccauagacacccccaacuacgacguccaaaaacacaucaacaaacuaugcggcaugcuccuaaucacagaagacgccaaccacaaauucaccggagucaucggcaugcucuacgccaugagccgccucggccgagaagacacaaucaaaauacuaagagacgccggcuaccacguaaaagccaacggcguagacguaaccacccaccgccaagacaucaacggcaaagaaaugaaauucgaaguucucacccucgccucacuaaccacggaaauccaaauaaacauugaaaucgaaagcagaaaauccuacaaaaagaugcuaaaagaaaugggcgagguagccccagaauaccgccacgacagccccgacugcggaaugaucauccucugcauugcagcccucgucaucaccaaacuagccgccggcgacagaagcggccuaaccgcaguaauccgccgagccaacaacguacucaaaaacgaaaugaaacgcuacaaaggccuccuccccaaagacaucgccaacagcuucuacgaaguauucgaaaaauacccgcacuucaucgacgucuucguacacuucggcauagcccaaagcagcacacgaggcggcucccgcgucgaaggaauauucgccggccuguucaugaacgcauacggagcgggccaagucaugcuccgcugggguguacuagccaaguccgucaaaaacaucaugcuagggcacgcaagcguacaagccgaaauggaacaaguagucgaagucuacgaauacgcacaaaaacuaggcggcgaagccggcuucuaccacauccuaaacaaccccaaagccucauuacucucccucacccaauuuccucacuucuccagcgucguccucggaaacgccgccggccuaggcauaaugggggaauaccgcggcaccccgcgcaaccaagaccucuacgacgcagcaaaagccuacgcagaacaacuaaaagaaaacggagucaucaacuacagcguacuggaccuaaccgccgaagaacucgaagccauaaaacaccaacucaaccccaaagacaacgacgucgagcucuaaggacuagugaagggaacacccaaauuuaauucagccuuaagcacaauuaauuaagagugaaacguaauuguacaagcaguuggucacccaccauagggcaugaucaacaccgcaaccuuuccuuuuucccccagugauucugaaaaaccccucuucccuucagcuugcuuagauguuccaaauuuaguaagcuuaaggcggccuacagaagaaaaagaaaaaaaaggccacaaaaguucccucucacuuucaguaaauaaaauaaaagcagcaacagaaauaaagaaauaaaugaaauucaaaaugaaauaaauauuguguugugcagcauuaaaaaaucaauaaaaauuaaaaaugagcaagaucuaaaaaaaaaaaaaaaaaaaaaaaaaaaaaaaaaaaaaaaaaaaaaaaaaaaaaaaaaaaaaaaaugcaucccccccccccccccccccccccccccccccaaaggcucuuuucagagccaccagaauu

SEQ ID NO: 20366 - RNA, 1528 nt, Artificial Sequence
  mRNA product Design d-4 comprising derived and/or modified sequence from HRSV(Memphis-37)__AIY60635.1__N (wt)
gggagagucccgcagucggcguccagcggcucugcuuguucgugugugugucguugcaggccuuauucaagcuuaccauggcucuuagcaaagucaaguugaacgauacacucaacaaagaucaacuucugucauccagcaaauacaccauccaacggagcacaggagauaguauugauacuccuaauuaugaugugcagaaacacaucaacaaguuauguggcauguuauuaaucacagaagaugcuaaucauaaauucacugggguaauagguauguuauaugcuaugucuagauuaggaagagaagacaccauaaaaauacucagagaugcgggauaucauguaaaagcaaauggaguggauguaacaacacaucgucaagacauuaauggaaaagaaaugaaauuugaaguguuaacauuggcaagcuuaacaacugaaauucaaaucaacauugagauagaaucuaggaaauccuacaaaaaaaugcuaaaagaaaugggagagguggcuccagaauacaggcaugacucuccugauuguggaaugauaauauuauguauagcagcauuaguaauaaccaaauuagcagcaggggauagaucuggucuuacugcugugauuaggagagcuaauaauguucuaaaaaaugaaaugaaacguuauaaaggcuuacuaccaaaggauauagccaacagcuucuaugaaguguuugaaaaauauccucacuuuauagauguuuuuguucauuuugguauagcacaaucuucuaccagagguggcaguagaguugaagggauuuuugcaggauuguuuaugaaugccuauggugcagggcaagugauguuacgguggggagucuuagcaaaaucaguuaaaaauauuaugcuaggacaugcuagugugcaagcagaaauggaacaaguuguggaaguuuaugaauaugcccaaaaauuggguggagaagcaggauucuaccauauauugaacaauccaaaagcaucauuauuaucuuugacucaauuuccccacuucuccaguguaguauugggcaaugcugcuggccuaggcauaaugggagaauacagagguacaccaaggaaucaagaucuauaugaugcugcaaaggcauaugcugaacaacucaaagaaaauggugugauuaacuacaguguauuagacuugacagcagaagaacuagaggcuaucaaacaucagcuuaauccaaaagauaaugauguagagcuuugaggacuaguggaagcauuuuccuggcugauuaaaagaaauuacucagcuauggucaucuguuccuguuagaaggcuaugcagcauauuauauacuaugcgcauguuaugaaaugcauaauaaaaaauuuuaaaaaaucuaaaagaucuaaaaaaaaaaaaaaaaaaaaaaaaaaaaaaaaaaaaaaaaaaaaaaaaaaaaaaaaaaaaaaaaugcaucccccccccccccccccccccccccccccccaaaggcucuuuucagagccaccagaauu

SEQ ID NO: 20367 - RNA, 1528 nt, Artificial Sequence
  mRNA product Design d-4 comprising derived and/or modified sequence from HRSV(Memphis-37)__AIY60635.1__N (opt1)
gggagagucccgcagucggcguccagcggcucugcuuguucgugugugugucguugcaggccuuauucaagcuuaccauggcccugagcaaggugaagcucaacgacacccugaacaaggaccagcugcucuccagcuccaaguacaccauccagcgcagcaccggcgacuccaucgacacccccaacuacgacguccagaagcacaucaacaagcugugcgggaugcugcucaucaccgaggacgccaaccacaaguucaccggcgugaucgggaugcuguacgcgaugagccggcugggccgcgaggacacgaucaagauccuccgggacgccggguaccacgugaaggccaacggcgucgacgugaccacccaccgccaggacaucaacggcaaggagaugaaguucgaggugcugacccuggccucccucacgaccgagauccagaucaacaucgagaucgagagccggaaguccuacaagaagaugcugaaggagaugggggaggucgccccggaguaccgccacgacagccccgacugcggcaugaucauccugugcaucgcggcccucgugaucaccaagcuggccgccggggaccgguccggccugaccgcggugauccgccgggccaacaacguccucaagaacgagaugaagcgcuacaaggggcugcugcccaaggacaucgccaacagcuucuacgagguguucgagaaguacccccacuucaucgacguguucguccacuucggcaucgcccaguccagcacgcggggcgggucccgcguggagggcaucuucgccgggcuguucaugaacgcguacggcgccggccaggugaugcugcgguggggcguccuggccaagagcgugaagaacaucaugcucgggcacgccuccgugcaggccgagauggagcaggucguggagguguacgaguacgcgcagaagcucgggggcgaggccggguucuaccacauccugaacaacccgaaggccagccuccugucccugacccaguucccccacuucagcagcgucgugcucggcaacgccgccggccuggggaucaugggcgaguaccgcgggacgccccggaaccaggaccuguacgacgcggccaaggccuacgccgagcagcucaaggagaacggcgugaucaacuacuccguccuggaccugaccgccgaggagcucgaggcgaucaagcaccagcugaaccccaaggacaacgacguggagcugugaggacuaguggaagcauuuuccuggcugauuaaaagaaauuacucagcuauggucaucuguuccuguuagaaggcuaugcagcauauuauauacuaugcgcauguuaugaaaugcauaauaaaaaauuuuaaaaaaucuaaaagaucuaaaaaaaaaaaaaaaaaaaaaaaaaaaaaaaaaaaaaaaaaaaaaaaaaaaaaaaaaaaaaaaaugcaucccccccccccccccccccccccccccccccaaaggcucuuuucagagccaccagaauu

SEQ ID NO: 20368 - RNA, 1528 nt, Artificial Sequence
  mRNA product Design d-4 comprising derived and/or modified sequence from HRSV(Memphis-37)__AIY60635.1__N (opt2)
gggagagucccgcagucggcguccagcggcucugcuuguucgugugugugucguugcaggccuuauucaagcuuaccauggcccucuccaaggucaagcucaacgacacccucaacaaggaccagcuccucuccuccuccaaguacaccauccagcgcuccaccggcgacuccaucgacacccccaacuacgacguccagaagcacaucaacaagcucugcggcaugcuccucaucaccgaggacgccaaccacaaguucaccggcgucaucggcaugcucuacgccaugucccgccucggccgcgaggacaccaucaagauccuccgcgacgccggcuaccacgucaaggccaacggcgucgacgucaccacccaccgccaggacaucaacggcaaggagaugaaguucgagguccucacccucgccucccucaccaccgagauccagaucaacaucgagaucgagucccgcaaguccuacaagaagaugcucaaggagaugggcgaggucgcccccgaguaccgccacgacucccccgacugcggcaugaucauccucugcaucgccgcccucgucaucaccaagcucgccgccggcgaccgcuccggccucaccgccgucauccgccgcgccaacaacguccucaagaacgagaugaagcgcuacaagggccuccuccccaaggacaucgccaacuccuucuacgaggucuucgagaaguacccccacuucaucgacgucuucguccacuucggcaucgcccaguccuccacccgcggcggcucccgcgucgagggcaucuucgccggccucuucaugaacgccuacggcgccggccaggucaugcuccgcuggggcguccucgccaaguccgucaagaacaucaugcucggccacgccuccguccaggccgagauggagcaggucgucgaggucuacgaguacgcccagaagcucggcggcgaggccggcuucuaccacauccucaacaaccccaaggccucccuccucucccucacccaguucccccacuucuccuccgucguccucggcaacgccgccggccucggcaucaugggcgaguaccgcggcaccccccgcaaccaggaccucuacgacgccgccaaggccuacgccgagcagcucaaggagaacggcgucaucaacuacuccguccucgaccucaccgccgaggagcucgaggccaucaagcaccagcucaaccccaaggacaacgacgucgagcucugaggacuaguggaagcauuuuccuggcugauuaaaagaaauuacucagcuauggucaucuguuccuguuagaaggcuaugcagcauauuauauacuaugcgcauguuaugaaaugcauaauaaaaaauuuuaaaaaaucuaaaagaucuaaaaaaaaaaaaaaaaaaaaaaaaaaaaaaaaaaaaaaaaaaaaaaaaaaaaaaaaaaaaaaaaugcaucccccccccccccccccccccccccccccccaaaggcucuuuucagagccaccagaauu

SEQ ID NO: 20369 - RNA, 1528 nt, Artificial Sequence
  mRNA product Design d-4 comprising derived and/or modified sequence from HRSV(Memphis-37)__AIY60635.1__N (opt3)
gggagagucccgcagucggcguccagcggcucugcuuguucgugugugugucguugcaggccuuauucaagcuuaccauggcccugagcaaggugaaacucaacgacacccuuaauaaggaucagcuguuguccucuucaaaauacacaauccaaagaaguacuggcgacagcauugauacgcccaacuaugacguccagaagcacauaaauaaauuaugcgggaugcugcuaaucaccgaggaugcuaaccauaaguucacaggaguuauugguaugcucuacgcaauguccaggcugggccgggaagacacuaucaagauucuucgcgaugccggguaucacgugaaagcgaauggaguagacgugaccacacaucgacaggauaucaacggcaaggagaugaaauuugaaguccugaccuuggcuucucucacuacagagauacagaucaauauugaaaucgagucgcguaagucauacaaaaagaugcugaaggagaugggugaaguggccccugaguauagacacgacagcccagauugugggaugauuauccugugcauagcagcccucguuauuaccaaauuagcugcaggagacaggaguggccugacggccgugauccggcgcgcuaacaauguccuuaagaacgaaaugaaaagauacaagggcuugcugccgaaagauauugccaauuccuucuaugagguguuugagaaguacccccauuucaucgacguauuuguucacuucgggaucgcgcaaucuagcacuaggggagguucccggguggaaggcauuuuugcagggcuauucaugaacgccuacggagcuggccaggucaugcuccgcuggggugugcuggccaaaucagugaagaauauaaugcuugggcacgcaaguguccaggcugagauggaacagguuguggagguauaugaauacgcccaaaagcugggaggcgaggcgggcuuuuaucauaucuugaacaauccuaaagccagccuccugucuuuaacccaguucccacacuuuuccucagugguccuggggaacgcagcuggacucgguauuaugggcgaguaccgagggacacccagaaaccaggaccuuuaugaugccgcuaaggccuacgcagaacagcugaaagagaauggagugaucaacuauagcguuuuggaccuaacugccgaggaacuggaagcuauaaagcaucaacucaauccuaaagauaacgacguggagcugugaggacuaguggaagcauuuuccuggcugauuaaaagaaauuacucagcuauggucaucuguuccuguuagaaggcuaugcagcauauuauauacuaugcgcauguuaugaaaugcauaauaaaaaauuuuaaaaaaucuaaaagaucuaaaaaaaaaaaaaaaaaaaaaaaaaaaaaaaaaaaaaaaaaaaaaaaaaaaaaaaaaaaaaaaaugcaucccccccccccccccccccccccccccccccaaaggcucuuuucagagccaccagaauu

SEQ ID NO: 20370 - RNA, 1528 nt, Artificial Sequence
  mRNA product Design d-4 comprising derived and/or modified sequence from HRSV(Memphis-37)__AIY60635.1__N (opt4)
gggagagucccgcagucggcguccagcggcucugcuuguucgugugugugucguugcaggccuuauucaagcuuaccauggcccugagcaaggugaagcugaacgacacccugaacaaggaccagcugcugagcagcagcaaguacaccauccagagaagcaccggcgacagcaucgacacccccaacuacgacgugcagaagcacaucaacaagcugugcggcaugcugcugaucaccgaggacgccaaccacaaguucaccggcgugaucggcaugcuguacgccaugagcagacugggcagagaggacaccaucaagauccugagagacgccggcuaccacgugaaggccaacggcguggacgugaccacccacagacaggacaucaacggcaaggagaugaaguucgaggugcugacccuggccagccugaccaccgagauccagaucaacaucgagaucgagagcagaaagagcuacaagaagaugcugaaggagaugggcgagguggcccccgaguacagacacgacagccccgacugcggcaugaucauccugugcaucgccgcccuggugaucaccaagcuggccgccggcgacagaagcggccugaccgccgugaucagaagagccaacaacgugcugaagaacgagaugaagagauacaagggccugcugcccaaggacaucgccaacagcuucuacgagguguucgagaaguacccccacuucaucgacguguucgugcacuucggcaucgcccagagcagcaccagaggcggcagcagaguggagggcaucuucgccggccuguucaugaacgccuacggcgccggccaggugaugcugagauggggcgugcuggccaagagcgugaagaacaucaugcugggccacgccagcgugcaggccgagauggagcaggugguggagguguacgaguacgcccagaagcugggcggcgaggccggcuucuaccacauccugaacaaccccaaggccagccugcugagccugacccaguucccccacuucagcagcguggugcugggcaacgccgccggccugggcaucaugggcgaguacagaggcacccccagaaaccaggaccuguacgacgccgccaaggccuacgccgagcagcugaaggagaacggcgugaucaacuacagcgugcuggaccugaccgccgaggagcuggaggccaucaagcaccagcugaaccccaaggacaacgacguggagcugugaggacuaguggaagcauuuuccuggcugauuaaaagaaauuacucagcuauggucaucuguuccuguuagaaggcuaugcagcauauuauauacuaugcgcauguuaugaaaugcauaauaaaaaauuuuaaaaaaucuaaaagaucuaaaaaaaaaaaaaaaaaaaaaaaaaaaaaaaaaaaaaaaaaaaaaaaaaaaaaaaaaaaaaaaaugcaucccccccccccccccccccccccccccccccaaaggcucuuuucagagccaccagaauu

SEQ ID NO: 20371 - RNA, 1528 nt, Artificial Sequence
  mRNA product Design d-4 comprising derived and/or modified sequence from HRSV(Memphis-37)__AIY60635.1__N (opt5)
gggagagucccgcagucggcguccagcggcucugcuuguucgugugugugucguugcaggccuuauucaagcuuaccauggcccugagcaaggugaaacucaacgacacccugaauaaggaucagcuucuguccucuagcaaauacacaauccaaagauccacgggcgacucuauugauacccccaacuaugacguccagaagcacaucaauaaacucugcgggaugcugcuuauuacagaggaugcuaaccauaaguucaccggaguuaucggcaugcuguacgccaugagccggcucgggcgcgaagacacaauuaagauccugagagaugcgggauaucacgugaaagcuaauggcguggacgucaccacacaucggcaggauaucaacgggaaggagaugaaauuugaagugcugacccucgccucccugacgaccgagauucagaucaauauugaaaucgagucucgcaagagcuacaaaaagaugcuuaaggagaugggagaaguugccccugaguauagacacgacuccccggauuguggcaugauuauccugugcauugcugcccucgugaucacaaaacuggcugccggcgaccggagcgggcuuaccgcggucauccgcagagccaacaaugugcugaagaacgaaaugaaacgguacaagggacuccugcccaaagauauugcuaauucuuucuaugagguuuuugagaaguacccucauuucaucgacguguuuguccacuucggcauugcccaauccagcacacgcgggggaucuagaguggaaggcaucuuugcugggcuguucaugaacgccuacggagcgggccaggugaugcuccgguggggcguccuggccaaauccguuaagaauauuaugcuugggcacgcuagcgugcaggccgagauggaacagguggucgagguguaugaauacgcucaaaagcugggaggcgaggccggguuuuaucauauccucaacaaucccaaagccucucugcuuucccugacccaguucccucacuuuagcuccguugugcucggaaacgcugcgggccuggggaucaugggagaguaccgcggcacgcccagaaaccaggaccuguaugaugccgcuaaggccuacgccgaacagcucaaagagaauggcgucauuaacuauucugugcuggaccuuacagcugaggaacuggaagccaucaagcaucaacucaauccuaaagauaacgacguugagcugugaggacuaguggaagcauuuuccuggcugauuaaaagaaauuacucagcuauggucaucuguuccuguuagaaggcuaugcagcauauuauauacuaugcgcauguuaugaaaugcauaauaaaaaauuuuaaaaaaucuaaaagaucuaaaaaaaaaaaaaaaaaaaaaaaaaaaaaaaaaaaaaaaaaaaaaaaaaaaaaaaaaaaaaaaaugcaucccccccccccccccccccccccccccccccaaaggcucuuuucagagccaccagaauu

SEQ ID NO: 20372 - RNA, 1528 nt, Artificial Sequence
  mRNA product Design d-4 comprising derived and/or modified sequence from HRSV(Memphis-37)__AIY60635.1__N (opt6)
gggagagucccgcagucggcguccagcggcucugcuuguucgugugugugucguugcaggccuuauucaagcuuaccauggccuuaaguaaaguaaaauuaaacgacacacuaaacaaagaccaauuacucucaucaucgaaauauacaauacaaagauccacaggagacuccauagauacaccaaauuacgacguacaaaaacauauaaacaaacucugcggaauguuauuaauaacagaagacgcaaaccacaaauucacaggagucauagguaugcuauacgcaaugucaagauuaggaagagaagauacaauaaaaauacuaagagacgcaggauaccacguaaaagcaaacggaguagacguaacaacacauagacaagauauaaacgguaaagaaaugaaauucgaaguacuaacacuagccagucuaacaacagaaauacaaauaaacauagaaauagaaagccgaaaaucauacaaaaaaauguuaaaagaaaugggggaaguagcacccgaauacagacaugauucaccugacugcggaaugauaauacucugcauagcggcauuagucauaacaaaacuagccgcaggagacagaagcggauuaacagcaguaauaagaagagcaaauaauguauuaaaaaaugaaaugaaaagguauaaaggauuacuaccaaaagauauagcaaacucauucuaugaaguuuucgaaaaauacccacacuucauagacgucuucguacacuuuggaauagcacaaagcagcacaagaggaggaagcagaguagaaggaauauucgcaggacuauucaugaaugcauacggagccggacaaguaaugcuaagauggggaguuuuagcaaaaagcguaaaaaacauaauguuaggacacgccuccguccaagccgaaauggaacaaguaguagaaguauacgaauaugcacaaaaacuaggaggagaagcaggauucuaucacauacucaauaacccaaaagcaucacuauugagcuuaacacaauucccacauuuuucauccguaguccuaggaaaugcagcaggcuuaggaauaaugggagaauacagaggcacaccaagaaaucaagacuuauacgaugcagcaaaagcauacgcagaacaacuaaaagaaaacggaguaauaaacuacucaguauuagauuuaacagcagaagaauuagaagcaauaaaacaucaacuaaauccuaaggauaaugauguagaacucuaaggacuaguggaagcauuuuccuggcugauuaaaagaaauuacucagcuauggucaucuguuccuguuagaaggcuaugcagcauauuauauacuaugcgcauguuaugaaaugcauaauaaaaaauuuuaaaaaaucuaaaagaucuaaaaaaaaaaaaaaaaaaaaaaaaaaaaaaaaaaaaaaaaaaaaaaaaaaaaaaaaaaaaaaaaugcaucccccccccccccccccccccccccccccccaaaggcucuuuucagagccaccagaauu

SEQ ID NO: 20373 - RNA, 1528 nt, Artificial Sequence
  mRNA product Design d-4 comprising derived and/or modified sequence from HRSV(Memphis-37)__AIY60635.1__N (opt11)
gggagagucccgcagucggcguccagcggcucugcuuguucgugugugugucguugcaggccuuauucaagcuuaccauggcccuaagcaaagucaaacucaacgacacacuaaacaaagaccaacuccucagcuccagcaaauacaccauccaacgauccaccggcgacuccauagacacccccaacuacgacguccaaaaacacaucaacaaacuaugcggcaugcuccuaaucacagaagacgccaaccacaaauucaccggagucaucggcaugcucuacgccaugagccgccucggccgagaagacacaaucaaaauacuaagagacgccggcuaccacguaaaagccaacggcguagacguaaccacccaccgccaagacaucaacggcaaagaaaugaaauucgaaguucucacccucgccucacuaaccacggaaauccaaauaaacauugaaaucgaaagcagaaaauccuacaaaaagaugcuaaaagaaaugggcgagguagccccagaauaccgccacgacagccccgacugcggaaugaucauccucugcauugcagcccucgucaucaccaaacuagccgccggcgacagaagcggccuaaccgcaguaauccgccgagccaacaacguacucaaaaacgaaaugaaacgcuacaaaggccuccuccccaaagacaucgccaacagcuucuacgaaguauucgaaaaauacccgcacuucaucgacgucuucguacacuucggcauagcccaaagcagcacacgaggcggcucccgcgucgaaggaauauucgccggccuguucaugaacgcauacggagcgggccaagucaugcuccgcugggguguacuagccaaguccgucaaaaacaucaugcuagggcacgcaagcguacaagccgaaauggaacaaguagucgaagucuacgaauacgcacaaaaacuaggcggcgaagccggcuucuaccacauccuaaacaaccccaaagccucauuacucucccucacccaauuuccucacuucuccagcgucguccucggaaacgccgccggccuaggcauaaugggggaauaccgcggcaccccgcgcaaccaagaccucuacgacgcagcaaaagccuacgcagaacaacuaaaagaaaacggagucaucaacuacagcguacuggaccuaaccgccgaagaacucgaagccauaaaacaccaacucaaccccaaagacaacgacgucgagcucuaaggacuaguggaagcauuuuccuggcugauuaaaagaaauuacucagcuauggucaucuguuccuguuagaaggcuaugcagcauauuauauacuaugcgcauguuaugaaaugcauaauaaaaaauuuuaaaaaaucuaaaagaucuaaaaaaaaaaaaaaaaaaaaaaaaaaaaaaaaaaaaaaaaaaaaaaaaaaaaaaaaaaaaaaaaugcaucccccccccccccccccccccccccccccccaaaggcucuuuucagagccaccagaauu

SEQ ID NO: 20374 - RNA, 1625 nt, Artificial Sequence
  mRNA product Design d-5 comprising derived and/or modified sequence from HRSV(Memphis-37)__AIY60635.1__N (wt)
gggagagggcgcuuggcuugcaaggacccugagcugcggcauugaagcacacccaacccaacucgacugaagucagccucacugaaccggaucugagaaucuucucucucugggcuugccagggcucuccgaaccuagcuagcauccucuucaauuccaacuagaaagcuuaccauggcucuuagcaaagucaaguugaacgauacacucaacaaagaucaacuucugucauccagcaaauacaccauccaacggagcacaggagauaguauugauacuccuaauuaugaugugcagaaacacaucaacaaguuauguggcauguuauuaaucacagaagaugcuaaucauaaauucacugggguaauagguauguuauaugcuaugucuagauuaggaagagaagacaccauaaaaauacucagagaugcgggauaucauguaaaagcaaauggaguggauguaacaacacaucgucaagacauuaauggaaaagaaaugaaauuugaaguguuaacauuggcaagcuuaacaacugaaauucaaaucaacauugagauagaaucuaggaaauccuacaaaaaaaugcuaaaagaaaugggagagguggcuccagaauacaggcaugacucuccugauuguggaaugauaauauuauguauagcagcauuaguaauaaccaaauuagcagcaggggauagaucuggucuuacugcugugauuaggagagcuaauaauguucuaaaaaaugaaaugaaacguuauaaaggcuuacuaccaaaggauauagccaacagcuucuaugaaguguuugaaaaauauccucacuuuauagauguuuuuguucauuuugguauagcacaaucuucuaccagagguggcaguagaguugaagggauuuuugcaggauuguuuaugaaugccuauggugcagggcaagugauguuacgguggggagucuuagcaaaaucaguuaaaaauauuaugcuaggacaugcuagugugcaagcagaaauggaacaaguuguggaaguuuaugaauaugcccaaaaauuggguggagaagcaggauucuaccauauauugaacaauccaaaagcaucauuauuaucuuugacucaauuuccccacuucuccaguguaguauugggcaaugcugcuggccuaggcauaaugggagaauacagagguacaccaaggaaucaagaucuauaugaugcugcaaaggcauaugcugaacaacucaaagaaaauggugugauuaacuacaguguauuagacuugacagcagaagaacuagaggcuaucaaacaucagcuuaauccaaaagauaaugauguagagcuuugaggacuaguggaagcauuuuccuggcugauuaaaagaaauuacucagcuauggucaucuguuccuguuagaaggcuaugcagcauauuauauacuaugcgcauguuaugaaaugcauaauaaaaaauuuuaaaaaaucuaaaagaucuaaaaaaaaaaaaaaaaaaaaaaaaaaaaaaaaaaaaaaaaaaaaaaaaaaaaaaaaaaaaaaaaugcaucccccccccccccccccccccccccccccccaaaggcucuuuucagagccaccagaauu

SEQ ID NO: 20375 - RNA, 1625 nt, Artificial Sequence
  mRNA product Design d-5 comprising derived and/or modified sequence from HRSV(Memphis-37)__AIY60635.1__N (opt1)
gggagagggcgcuuggcuugcaaggacccugagcugcggcauugaagcacacccaacccaacucgacugaagucagccucacugaaccggaucugagaaucuucucucucugggcuugccagggcucuccgaaccuagcuagcauccucuucaauuccaacuagaaagcuuaccauggcccugagcaaggugaagcucaacgacacccugaacaaggaccagcugcucuccagcuccaaguacaccauccagcgcagcaccggcgacuccaucgacacccccaacuacgacguccagaagcacaucaacaagcugugcgggaugcugcucaucaccgaggacgccaaccacaaguucaccggcgugaucgggaugcuguacgcgaugagccggcugggccgcgaggacacgaucaagauccuccgggacgccggguaccacgugaaggccaacggcgucgacgugaccacccaccgccaggacaucaacggcaaggagaugaaguucgaggugcugacccuggccucccucacgaccgagauccagaucaacaucgagaucgagagccggaaguccuacaagaagaugcugaaggagaugggggaggucgccccggaguaccgccacgacagccccgacugcggcaugaucauccugugcaucgcggcccucgugaucaccaagcuggccgccggggaccgguccggccugaccgcggugauccgccgggccaacaacguccucaagaacgagaugaagcgcuacaaggggcugcugcccaaggacaucgccaacagcuucuacgagguguucgagaaguacccccacuucaucgacguguucguccacuucggcaucgcccaguccagcacgcggggcgggucccgcguggagggcaucuucgccgggcuguucaugaacgcguacggcgccggccaggugaugcugcgguggggcguccuggccaagagcgugaagaacaucaugcucgggcacgccuccgugcaggccgagauggagcaggucguggagguguacgaguacgcgcagaagcucgggggcgaggccggguucuaccacauccugaacaacccgaaggccagccuccugucccugacccaguucccccacuucagcagcgucgugcucggcaacgccgccggccuggggaucaugggcgaguaccgcgggacgccccggaaccaggaccuguacgacgcggccaaggccuacgccgagcagcucaaggagaacggcgugaucaacuacuccguccuggaccugaccgccgaggagcucgaggcgaucaagcaccagcugaaccccaaggacaacgacguggagcugugaggacuaguggaagcauuuuccuggcugauuaaaagaaauuacucagcuauggucaucuguuccuguuagaaggcuaugcagcauauuauauacuaugcgcauguuaugaaaugcauaauaaaaaauuuuaaaaaaucuaaaagaucuaaaaaaaaaaaaaaaaaaaaaaaaaaaaaaaaaaaaaaaaaaaaaaaaaaaaaaaaaaaaaaaaugcaucccccccccccccccccccccccccccccccaaaggcucuuuucagagccaccagaauu

SEQ ID NO: 20376 - RNA, 1625 nt, Artificial Sequence
  mRNA product Design d-5 comprising derived and/or modified sequence from HRSV(Memphis-37)__AIY60635.1__N (opt2)
gggagagggcgcuuggcuugcaaggacccugagcugcggcauugaagcacacccaacccaacucgacugaagucagccucacugaaccggaucugagaaucuucucucucugggcuugccagggcucuccgaaccuagcuagcauccucuucaauuccaacuagaaagcuuaccauggcccucuccaaggucaagcucaacgacacccucaacaaggaccagcuccucuccuccuccaaguacaccauccagcgcuccaccggcgacuccaucgacacccccaacuacgacguccagaagcacaucaacaagcucugcggcaugcuccucaucaccgaggacgccaaccacaaguucaccggcgucaucggcaugcucuacgccaugucccgccucggccgcgaggacaccaucaagauccuccgcgacgccggcuaccacgucaaggccaacggcgucgacgucaccacccaccgccaggacaucaacggcaaggagaugaaguucgagguccucacccucgccucccucaccaccgagauccagaucaacaucgagaucgagucccgcaaguccuacaagaagaugcucaaggagaugggcgaggucgcccccgaguaccgccacgacucccccgacugcggcaugaucauccucugcaucgccgcccucgucaucaccaagcucgccgccggcgaccgcuccggccucaccgccgucauccgccgcgccaacaacguccucaagaacgagaugaagcgcuacaagggccuccuccccaaggacaucgccaacuccuucuacgaggucuucgagaaguacccccacuucaucgacgucuucguccacuucggcaucgcccaguccuccacccgcggcggcucccgcgucgagggcaucuucgccggccucuucaugaacgccuacggcgccggccaggucaugcuccgcuggggcguccucgccaaguccgucaagaacaucaugcucggccacgccuccguccaggccgagauggagcaggucgucgaggucuacgaguacgcccagaagcucggcggcgaggccggcuucuaccacauccucaacaaccccaaggccucccuccucucccucacccaguucccccacuucuccuccgucguccucggcaacgccgccggccucggcaucaugggcgaguaccgcggcaccccccgcaaccaggaccucuacgacgccgccaaggccuacgccgagcagcucaaggagaacggcgucaucaacuacuccguccucgaccucaccgccgaggagcucgaggccaucaagcaccagcucaaccccaaggacaacgacgucgagcucugaggacuaguggaagcauuuuccuggcugauuaaaagaaauuacucagcuauggucaucuguuccuguuagaaggcuaugcagcauauuauauacuaugcgcauguuaugaaaugcauaauaaaaaauuuuaaaaaaucuaaaagaucuaaaaaaaaaaaaaaaaaaaaaaaaaaaaaaaaaaaaaaaaaaaaaaaaaaaaaaaaaaaaaaaaugcaucccccccccccccccccccccccccccccccaaaggcucuuuucagagccaccagaauu

SEQ ID NO: 20377 - RNA, 1625 nt, Artificial Sequence
  mRNA product Design d-5 comprising derived and/or modified sequence from HRSV(Memphis-37)__AIY60635.1__N (opt3)
gggagagggcgcuuggcuugcaaggacccugagcugcggcauugaagcacacccaacccaacucgacugaagucagccucacugaaccggaucugagaaucuucucucucugggcuugccagggcucuccgaaccuagcuagcauccucuucaauuccaacuagaaagcuuaccauggcccugagcaaggugaaacucaacgacacccuuaauaaggaucagcuguuguccucuucaaaauacacaauccaaagaaguacuggcgacagcauugauacgcccaacuaugacguccagaagcacauaaauaaauuaugcgggaugcugcuaaucaccgaggaugcuaaccauaaguucacaggaguuauugguaugcucuacgcaauguccaggcugggccgggaagacacuaucaagauucuucgcgaugccggguaucacgugaaagcgaauggaguagacgugaccacacaucgacaggauaucaacggcaaggagaugaaauuugaaguccugaccuuggcuucucucacuacagagauacagaucaauauugaaaucgagucgcguaagucauacaaaaagaugcugaaggagaugggugaaguggccccugaguauagacacgacagcccagauugugggaugauuauccugugcauagcagcccucguuauuaccaaauuagcugcaggagacaggaguggccugacggccgugauccggcgcgcuaacaauguccuuaagaacgaaaugaaaagauacaagggcuugcugccgaaagauauugccaauuccuucuaugagguguuugagaaguacccccauuucaucgacguauuuguucacuucgggaucgcgcaaucuagcacuaggggagguucccggguggaaggcauuuuugcagggcuauucaugaacgccuacggagcuggccaggucaugcuccgcuggggugugcuggccaaaucagugaagaauauaaugcuugggcacgcaaguguccaggcugagauggaacagguuguggagguauaugaauacgcccaaaagcugggaggcgaggcgggcuuuuaucauaucuugaacaauccuaaagccagccuccugucuuuaacccaguucccacacuuuuccucagugguccuggggaacgcagcuggacucgguauuaugggcgaguaccgagggacacccagaaaccaggaccuuuaugaugccgcuaaggccuacgcagaacagcugaaagagaauggagugaucaacuauagcguuuuggaccuaacugccgaggaacuggaagcuauaaagcaucaacucaauccuaaagauaacgacguggagcugugaggacuaguggaagcauuuuccuggcugauuaaaagaaauuacucagcuauggucaucuguuccuguuagaaggcuaugcagcauauuauauacuaugcgcauguuaugaaaugcauaauaaaaaauuuuaaaaaaucuaaaagaucuaaaaaaaaaaaaaaaaaaaaaaaaaaaaaaaaaaaaaaaaaaaaaaaaaaaaaaaaaaaaaaaaugcaucccccccccccccccccccccccccccccccaaaggcucuuuucagagccaccagaauu

SEQ ID NO: 20378 - RNA, 1625 nt, Artificial Sequence
  mRNA product Design d-5 comprising derived and/or modified sequence from HRSV(Memphis-37)__AIY60635.1__N (opt4)
gggagagggcgcuuggcuugcaaggacccugagcugcggcauugaagcacacccaacccaacucgacugaagucagccucacugaaccggaucugagaaucuucucucucugggcuugccagggcucuccgaaccuagcuagcauccucuucaauuccaacuagaaagcuuaccauggcccugagcaaggugaagcugaacgacacccugaacaaggaccagcugcugagcagcagcaaguacaccauccagagaagcaccggcgacagcaucgacacccccaacuacgacgugcagaagcacaucaacaagcugugcggcaugcugcugaucaccgaggacgccaaccacaaguucaccggcgugaucggcaugcuguacgccaugagcagacugggcagagaggacaccaucaagauccugagagacgccggcuaccacgugaaggccaacggcguggacgugaccacccacagacaggacaucaacggcaaggagaugaaguucgaggugcugacccuggccagccugaccaccgagauccagaucaacaucgagaucgagagcagaaagagcuacaagaagaugcugaaggagaugggcgagguggcccccgaguacagacacgacagccccgacugcggcaugaucauccugugcaucgccgcccuggugaucaccaagcuggccgccggcgacagaagcggccugaccgccgugaucagaagagccaacaacgugcugaagaacgagaugaagagauacaagggccugcugcccaaggacaucgccaacagcuucuacgagguguucgagaaguacccccacuucaucgacguguucgugcacuucggcaucgcccagagcagcaccagaggcggcagcagaguggagggcaucuucgccggccuguucaugaacgccuacggcgccggccaggugaugcugagauggggcgugcuggccaagagcgugaagaacaucaugcugggccacgccagcgugcaggccgagauggagcaggugguggagguguacgaguacgcccagaagcugggcggcgaggccggcuucuaccacauccugaacaaccccaaggccagccugcugagccugacccaguucccccacuucagcagcguggugcugggcaacgccgccggccugggcaucaugggcgaguacagaggcacccccagaaaccaggaccuguacgacgccgccaaggccuacgccgagcagcugaaggagaacggcgugaucaacuacagcgugcuggaccugaccgccgaggagcuggaggccaucaagcaccagcugaaccccaaggacaacgacguggagcugugaggacuaguggaagcauuuuccuggcugauuaaaagaaauuacucagcuauggucaucuguuccuguuagaaggcuaugcagcauauuauauacuaugcgcauguuaugaaaugcauaauaaaaaauuuuaaaaaaucuaaaagaucuaaaaaaaaaaaaaaaaaaaaaaaaaaaaaaaaaaaaaaaaaaaaaaaaaaaaaaaaaaaaaaaaugcaucccccccccccccccccccccccccccccccaaaggcucuuuucagagccaccagaauu

SEQ ID NO: 20379 - RNA, 1625 nt, Artificial Sequence
  mRNA product Design d-5 comprising derived and/or modified sequence from HRSV(Memphis-37)__AIY60635.1__N (opt5)
gggagagggcgcuuggcuugcaaggacccugagcugcggcauugaagcacacccaacccaacucgacugaagucagccucacugaaccggaucugagaaucuucucucucugggcuugccagggcucuccgaaccuagcuagcauccucuucaauuccaacuagaaagcuuaccauggcccugagcaaggugaaacucaacgacacccugaauaaggaucagcuucuguccucuagcaaauacacaauccaaagauccacgggcgacucuauugauacccccaacuaugacguccagaagcacaucaauaaacucugcgggaugcugcuuauuacagaggaugcuaaccauaaguucaccggaguuaucggcaugcuguacgccaugagccggcucgggcgcgaagacacaauuaagauccugagagaugcgggauaucacgugaaagcuaauggcguggacgucaccacacaucggcaggauaucaacgggaaggagaugaaauuugaagugcugacccucgccucccugacgaccgagauucagaucaauauugaaaucgagucucgcaagagcuacaaaaagaugcuuaaggagaugggagaaguugccccugaguauagacacgacuccccggauuguggcaugauuauccugugcauugcugcccucgugaucacaaaacuggcugccggcgaccggagcgggcuuaccgcggucauccgcagagccaacaaugugcugaagaacgaaaugaaacgguacaagggacuccugcccaaagauauugcuaauucuuucuaugagguuuuugagaaguacccucauuucaucgacguguuuguccacuucggcauugcccaauccagcacacgcgggggaucuagaguggaaggcaucuuugcugggcuguucaugaacgccuacggagcgggccaggugaugcuccgguggggcguccuggccaaauccguuaagaauauuaugcuugggcacgcuagcgugcaggccgagauggaacagguggucgagguguaugaauacgcucaaaagcugggaggcgaggccggguuuuaucauauccucaacaaucccaaagccucucugcuuucccugacccaguucccucacuuuagcuccguugugcucggaaacgcugcgggccuggggaucaugggagaguaccgcggcacgcccagaaaccaggaccuguaugaugccgcuaaggccuacgccgaacagcucaaagagaauggcgucauuaacuauucugugcuggaccuuacagcugaggaacuggaagccaucaagcaucaacucaauccuaaagauaacgacguugagcugugaggacuaguggaagcauuuuccuggcugauuaaaagaaauuacucagcuauggucaucuguuccuguuagaaggcuaugcagcauauuauauacuaugcgcauguuaugaaaugcauaauaaaaaauuuuaaaaaaucuaaaagaucuaaaaaaaaaaaaaaaaaaaaaaaaaaaaaaaaaaaaaaaaaaaaaaaaaaaaaaaaaaaaaaaaugcaucccccccccccccccccccccccccccccccaaaggcucuuuucagagccaccagaauu

SEQ ID NO: 20380 - RNA, 1625 nt, Artificial Sequence
  mRNA product Design d-5 comprising derived and/or modified sequence from HRSV(Memphis-37)__AIY60635.1__N (opt6)
gggagagggcgcuuggcuugcaaggacccugagcugcggcauugaagcacacccaacccaacucgacugaagucagccucacugaaccggaucugagaaucuucucucucugggcuugccagggcucuccgaaccuagcuagcauccucuucaauuccaacuagaaagcuuaccauggccuuaaguaaaguaaaauuaaacgacacacuaaacaaagaccaauuacucucaucaucgaaauauacaauacaaagauccacaggagacuccauagauacaccaaauuacgacguacaaaaacauauaaacaaacucugcggaauguuauuaauaacagaagacgcaaaccacaaauucacaggagucauagguaugcuauacgcaaugucaagauuaggaagagaagauacaauaaaaauacuaagagacgcaggauaccacguaaaagcaaacggaguagacguaacaacacauagacaagauauaaacgguaaagaaaugaaauucgaaguacuaacacuagccagucuaacaacagaaauacaaauaaacauagaaauagaaagccgaaaaucauacaaaaaaauguuaaaagaaaugggggaaguagcacccgaauacagacaugauucaccugacugcggaaugauaauacucugcauagcggcauuagucauaacaaaacuagccgcaggagacagaagcggauuaacagcaguaauaagaagagcaaauaauguauuaaaaaaugaaaugaaaagguauaaaggauuacuaccaaaagauauagcaaacucauucuaugaaguuuucgaaaaauacccacacuucauagacgucuucguacacuuuggaauagcacaaagcagcacaagaggaggaagcagaguagaaggaauauucgcaggacuauucaugaaugcauacggagccggacaaguaaugcuaagauggggaguuuuagcaaaaagcguaaaaaacauaauguuaggacacgccuccguccaagccgaaauggaacaaguaguagaaguauacgaauaugcacaaaaacuaggaggagaagcaggauucuaucacauacucaauaacccaaaagcaucacuauugagcuuaacacaauucccacauuuuucauccguaguccuaggaaaugcagcaggcuuaggaauaaugggagaauacagaggcacaccaagaaaucaagacuuauacgaugcagcaaaagcauacgcagaacaacuaaaagaaaacggaguaauaaacuacucaguauuagauuuaacagcagaagaauuagaagcaauaaaacaucaacuaaauccuaaggauaaugauguagaacucuaaggacuaguggaagcauuuuccuggcugauuaaaagaaauuacucagcuauggucaucuguuccuguuagaaggcuaugcagcauauuauauacuaugcgcauguuaugaaaugcauaauaaaaaauuuuaaaaaaucuaaaagaucuaaaaaaaaaaaaaaaaaaaaaaaaaaaaaaaaaaaaaaaaaaaaaaaaaaaaaaaaaaaaaaaaugcaucccccccccccccccccccccccccccccccaaaggcucuuuucagagccaccagaauu

SEQ ID NO: 20381 - RNA, 1625 nt, Artificial Sequence
  mRNA product Design d-5 comprising derived and/or modified sequence from HRSV(Memphis-37)__AIY60635.1__N (opt11)
gggagagggcgcuuggcuugcaaggacccugagcugcggcauugaagcacacccaacccaacucgacugaagucagccucacugaaccggaucugagaaucuucucucucugggcuugccagggcucuccgaaccuagcuagcauccucuucaauuccaacuagaaagcuuaccauggcccuaagcaaagucaaacucaacgacacacuaaacaaagaccaacuccucagcuccagcaaauacaccauccaacgauccaccggcgacuccauagacacccccaacuacgacguccaaaaacacaucaacaaacuaugcggcaugcuccuaaucacagaagacgccaaccacaaauucaccggagucaucggcaugcucuacgccaugagccgccucggccgagaagacacaaucaaaauacuaagagacgccggcuaccacguaaaagccaacggcguagacguaaccacccaccgccaagacaucaacggcaaagaaaugaaauucgaaguucucacccucgccucacuaaccacggaaauccaaauaaacauugaaaucgaaagcagaaaauccuacaaaaagaugcuaaaagaaaugggcgagguagccccagaauaccgccacgacagccccgacugcggaaugaucauccucugcauugcagcccucgucaucaccaaacuagccgccggcgacagaagcggccuaaccgcaguaauccgccgagccaacaacguacucaaaaacgaaaugaaacgcuacaaaggccuccuccccaaagacaucgccaacagcuucuacgaaguauucgaaaaauacccgcacuucaucgacgucuucguacacuucggcauagcccaaagcagcacacgaggcggcucccgcgucgaaggaauauucgccggccuguucaugaacgcauacggagcgggccaagucaugcuccgcugggguguacuagccaaguccgucaaaaacaucaugcuagggcacgcaagcguacaagccgaaauggaacaaguagucgaagucuacgaauacgcacaaaaacuaggcggcgaagccggcuucuaccacauccuaaacaaccccaaagccucauuacucucccucacccaauuuccucacuucuccagcgucguccucggaaacgccgccggccuaggcauaaugggggaauaccgcggcaccccgcgcaaccaagaccucuacgacgcagcaaaagccuacgcagaacaacuaaaagaaaacggagucaucaacuacagcguacuggaccuaaccgccgaagaacucgaagccauaaaacaccaacucaaccccaaagacaacgacgucgagcucuaaggacuaguggaagcauuuuccuggcugauuaaaagaaauuacucagcuauggucaucuguuccuguuagaaggcuaugcagcauauuauauacuaugcgcauguuaugaaaugcauaauaaaaaauuuuaaaaaaucuaaaagaucuaaaaaaaaaaaaaaaaaaaaaaaaaaaaaaaaaaaaaaaaaaaaaaaaaaaaaaaaaaaaaaaaugcaucccccccccccccccccccccccccccccccaaaggcucuuuucagagccaccagaauu

SEQ ID NO: 20382 - RNA, 1505 nt, Artificial Sequence
  mRNA product Design e-1 comprising derived and/or modified sequence from HRSV(Memphis-37)__AIY60635.1__N (wt)
gggagaauauaagcguuggcggagcgucgguuguagcacucugcgcgcccgcucuucugcugcuguuugucuacuuccuccugcuuccccgccgccgccgccgccaucaagcuuaccauggcucuuagcaaagucaaguugaacgauacacucaacaaagaucaacuucugucauccagcaaauacaccauccaacggagcacaggagauaguauugauacuccuaauuaugaugugcagaaacacaucaacaaguuauguggcauguuauuaaucacagaagaugcuaaucauaaauucacugggguaauagguauguuauaugcuaugucuagauuaggaagagaagacaccauaaaaauacucagagaugcgggauaucauguaaaagcaaauggaguggauguaacaacacaucgucaagacauuaauggaaaagaaaugaaauuugaaguguuaacauuggcaagcuuaacaacugaaauucaaaucaacauugagauagaaucuaggaaauccuacaaaaaaaugcuaaaagaaaugggagagguggcuccagaauacaggcaugacucuccugauuguggaaugauaauauuauguauagcagcauuaguaauaaccaaauuagcagcaggggauagaucuggucuuacugcugugauuaggagagcuaauaauguucuaaaaaaugaaaugaaacguuauaaaggcuuacuaccaaaggauauagccaacagcuucuaugaaguguuugaaaaauauccucacuuuauagauguuuuuguucauuuugguauagcacaaucuucuaccagagguggcaguagaguugaagggauuuuugcaggauuguuuaugaaugccuauggugcagggcaagugauguuacgguggggagucuuagcaaaaucaguuaaaaauauuaugcuaggacaugcuagugugcaagcagaaauggaacaaguuguggaaguuuaugaauaugcccaaaaauuggguggagaagcaggauucuaccauauauugaacaauccaaaagcaucauuauuaucuuugacucaauuuccccacuucuccaguguaguauugggcaaugcugcuggccuaggcauaaugggagaauacagagguacaccaaggaaucaagaucuauaugaugcugcaaaggcauaugcugaacaacucaaagaaaauggugugauuaacuacaguguauuagacuugacagcagaagaacuagaggcuaucaaacaucagcuuaauccaaaagauaaugauguagagcuuugaggacuaguguccaccugucccuccugggcugcuggauugucucguuuuccugccaaauaaacaggaucagcgcuuuacagaucuaaaaaaaaaaaaaaaaaaaaaaaaaaaaaaaaaaaaaaaaaaaaaaaaaaaaaaaaaaaaaaaaugcaucccccccccccccccccccccccccccccccaaaggcucuuuucagagccaccagaauu

SEQ ID NO: 20383 - RNA, 1505 nt, Artificial Sequence
  mRNA product Design e-1 comprising derived and/or modified sequence from HRSV(Memphis-37)__AIY60635.1__N (opt1)
gggagaauauaagcguuggcggagcgucgguuguagcacucugcgcgcccgcucuucugcugcuguuugucuacuuccuccugcuuccccgccgccgccgccgccaucaagcuuaccauggcccugagcaaggugaagcucaacgacacccugaacaaggaccagcugcucuccagcuccaaguacaccauccagcgcagcaccggcgacuccaucgacacccccaacuacgacguccagaagcacaucaacaagcugugcgggaugcugcucaucaccgaggacgccaaccacaaguucaccggcgugaucgggaugcuguacgcgaugagccggcugggccgcgaggacacgaucaagauccuccgggacgccggguaccacgugaaggccaacggcgucgacgugaccacccaccgccaggacaucaacggcaaggagaugaaguucgaggugcugacccuggccucccucacgaccgagauccagaucaacaucgagaucgagagccggaaguccuacaagaagaugcugaaggagaugggggaggucgccccggaguaccgccacgacagccccgacugcggcaugaucauccugugcaucgcggcccucgugaucaccaagcuggccgccggggaccgguccggccugaccgcggugauccgccgggccaacaacguccucaagaacgagaugaagcgcuacaaggggcugcugcccaaggacaucgccaacagcuucuacgagguguucgagaaguacccccacuucaucgacguguucguccacuucggcaucgcccaguccagcacgcggggcgggucccgcguggagggcaucuucgccgggcuguucaugaacgcguacggcgccggccaggugaugcugcgguggggcguccuggccaagagcgugaagaacaucaugcucgggcacgccuccgugcaggccgagauggagcaggucguggagguguacgaguacgcgcagaagcucgggggcgaggccggguucuaccacauccugaacaacccgaaggccagccuccugucccugacccaguucccccacuucagcagcgucgugcucggcaacgccgccggccuggggaucaugggcgaguaccgcgggacgccccggaaccaggaccuguacgacgcggccaaggccuacgccgagcagcucaaggagaacggcgugaucaacuacuccguccuggaccugaccgccgaggagcucgaggcgaucaagcaccagcugaaccccaaggacaacgacguggagcugugaggacuaguguccaccugucccuccugggcugcuggauugucucguuuuccugccaaauaaacaggaucagcgcuuuacagaucuaaaaaaaaaaaaaaaaaaaaaaaaaaaaaaaaaaaaaaaaaaaaaaaaaaaaaaaaaaaaaaaaugcaucccccccccccccccccccccccccccccccaaaggcucuuuucagagccaccagaauu

SEQ ID NO: 20384 - RNA, 1505 nt, Artificial Sequence
  mRNA product Design e-1 comprising derived and/or modified sequence from HRSV(Memphis-37)__AIY60635.1__N (opt2)
gggagaauauaagcguuggcggagcgucgguuguagcacucugcgcgcccgcucuucugcugcuguuugucuacuuccuccugcuuccccgccgccgccgccgccaucaagcuuaccauggcccucuccaaggucaagcucaacgacacccucaacaaggaccagcuccucuccuccuccaaguacaccauccagcgcuccaccggcgacuccaucgacacccccaacuacgacguccagaagcacaucaacaagcucugcggcaugcuccucaucaccgaggacgccaaccacaaguucaccggcgucaucggcaugcucuacgccaugucccgccucggccgcgaggacaccaucaagauccuccgcgacgccggcuaccacgucaaggccaacggcgucgacgucaccacccaccgccaggacaucaacggcaaggagaugaaguucgagguccucacccucgccucccucaccaccgagauccagaucaacaucgagaucgagucccgcaaguccuacaagaagaugcucaaggagaugggcgaggucgcccccgaguaccgccacgacucccccgacugcggcaugaucauccucugcaucgccgcccucgucaucaccaagcucgccgccggcgaccgcuccggccucaccgccgucauccgccgcgccaacaacguccucaagaacgagaugaagcgcuacaagggccuccuccccaaggacaucgccaacuccuucuacgaggucuucgagaaguacccccacuucaucgacgucuucguccacuucggcaucgcccaguccuccacccgcggcggcucccgcgucgagggcaucuucgccggccucuucaugaacgccuacggcgccggccaggucaugcuccgcuggggcguccucgccaaguccgucaagaacaucaugcucggccacgccuccguccaggccgagauggagcaggucgucgaggucuacgaguacgcccagaagcucggcggcgaggccggcuucuaccacauccucaacaaccccaaggccucccuccucucccucacccaguucccccacuucuccuccgucguccucggcaacgccgccggccucggcaucaugggcgaguaccgcggcaccccccgcaaccaggaccucuacgacgccgccaaggccuacgccgagcagcucaaggagaacggcgucaucaacuacuccguccucgaccucaccgccgaggagcucgaggccaucaagcaccagcucaaccccaaggacaacgacgucgagcucugaggacuaguguccaccugucccuccugggcugcuggauugucucguuuuccugccaaauaaacaggaucagcgcuuuacagaucuaaaaaaaaaaaaaaaaaaaaaaaaaaaaaaaaaaaaaaaaaaaaaaaaaaaaaaaaaaaaaaaaugcaucccccccccccccccccccccccccccccccaaaggcucuuuucagagccaccagaauu

SEQ ID NO: 20385 - RNA, 1505 nt, Artificial Sequence
  mRNA product Design e-1 comprising derived and/or modified sequence from HRSV(Memphis-37)__AIY60635.1__N (opt3)
gggagaauauaagcguuggcggagcgucgguuguagcacucugcgcgcccgcucuucugcugcuguuugucuacuuccuccugcuuccccgccgccgccgccgccaucaagcuuaccauggcccugagcaaggugaaacucaacgacacccuuaauaaggaucagcuguuguccucuucaaaauacacaauccaaagaaguacuggcgacagcauugauacgcccaacuaugacguccagaagcacauaaauaaauuaugcgggaugcugcuaaucaccgaggaugcuaaccauaaguucacaggaguuauugguaugcucuacgcaauguccaggcugggccgggaagacacuaucaagauucuucgcgaugccggguaucacgugaaagcgaauggaguagacgugaccacacaucgacaggauaucaacggcaaggagaugaaauuugaaguccugaccuuggcuucucucacuacagagauacagaucaauauugaaaucgagucgcguaagucauacaaaaagaugcugaaggagaugggugaaguggccccugaguauagacacgacagcccagauugugggaugauuauccugugcauagcagcccucguuauuaccaaauuagcugcaggagacaggaguggccugacggccgugauccggcgcgcuaacaauguccuuaagaacgaaaugaaaagauacaagggcuugcugccgaaagauauugccaauuccuucuaugagguguuugagaaguacccccauuucaucgacguauuuguucacuucgggaucgcgcaaucuagcacuaggggagguucccggguggaaggcauuuuugcagggcuauucaugaacgccuacggagcuggccaggucaugcuccgcuggggugugcuggccaaaucagugaagaauauaaugcuugggcacgcaaguguccaggcugagauggaacagguuguggagguauaugaauacgcccaaaagcugggaggcgaggcgggcuuuuaucauaucuugaacaauccuaaagccagccuccugucuuuaacccaguucccacacuuuuccucagugguccuggggaacgcagcuggacucgguauuaugggcgaguaccgagggacacccagaaaccaggaccuuuaugaugccgcuaaggccuacgcagaacagcugaaagagaauggagugaucaacuauagcguuuuggaccuaacugccgaggaacuggaagcuauaaagcaucaacucaauccuaaagauaacgacguggagcugugaggacuaguguccaccugucccuccugggcugcuggauugucucguuuuccugccaaauaaacaggaucagcgcuuuacagaucuaaaaaaaaaaaaaaaaaaaaaaaaaaaaaaaaaaaaaaaaaaaaaaaaaaaaaaaaaaaaaaaaugcaucccccccccccccccccccccccccccccccaaaggcucuuuucagagccaccagaauu

SEQ ID NO: 20386 - RNA, 1505 nt, Artificial Sequence
  mRNA product Design e-1 comprising derived and/or modified sequence from HRSV(Memphis-37)__AIY60635.1__N (opt4)
gggagaauauaagcguuggcggagcgucgguuguagcacucugcgcgcccgcucuucugcugcuguuugucuacuuccuccugcuuccccgccgccgccgccgccaucaagcuuaccauggcccugagcaaggugaagcugaacgacacccugaacaaggaccagcugcugagcagcagcaaguacaccauccagagaagcaccggcgacagcaucgacacccccaacuacgacgugcagaagcacaucaacaagcugugcggcaugcugcugaucaccgaggacgccaaccacaaguucaccggcgugaucggcaugcuguacgccaugagcagacugggcagagaggacaccaucaagauccugagagacgccggcuaccacgugaaggccaacggcguggacgugaccacccacagacaggacaucaacggcaaggagaugaaguucgaggugcugacccuggccagccugaccaccgagauccagaucaacaucgagaucgagagcagaaagagcuacaagaagaugcugaaggagaugggcgagguggcccccgaguacagacacgacagccccgacugcggcaugaucauccugugcaucgccgcccuggugaucaccaagcuggccgccggcgacagaagcggccugaccgccgugaucagaagagccaacaacgugcugaagaacgagaugaagagauacaagggccugcugcccaaggacaucgccaacagcuucuacgagguguucgagaaguacccccacuucaucgacguguucgugcacuucggcaucgcccagagcagcaccagaggcggcagcagaguggagggcaucuucgccggccuguucaugaacgccuacggcgccggccaggugaugcugagauggggcgugcuggccaagagcgugaagaacaucaugcugggccacgccagcgugcaggccgagauggagcaggugguggagguguacgaguacgcccagaagcugggcggcgaggccggcuucuaccacauccugaacaaccccaaggccagccugcugagccugacccaguucccccacuucagcagcguggugcugggcaacgccgccggccugggcaucaugggcgaguacagaggcacccccagaaaccaggaccuguacgacgccgccaaggccuacgccgagcagcugaaggagaacggcgugaucaacuacagcgugcuggaccugaccgccgaggagcuggaggccaucaagcaccagcugaaccccaaggacaacgacguggagcugugaggacuaguguccaccugucccuccugggcugcuggauugucucguuuuccugccaaauaaacaggaucagcgcuuuacagaucuaaaaaaaaaaaaaaaaaaaaaaaaaaaaaaaaaaaaaaaaaaaaaaaaaaaaaaaaaaaaaaaaugcaucccccccccccccccccccccccccccccccaaaggcucuuuucagagccaccagaauu

SEQ ID NO: 20387 - RNA, 1505 nt, Artificial Sequence
  mRNA product Design e-1 comprising derived and/or modified sequence from HRSV(Memphis-37)__AIY60635.1__N (opt5)
gggagaauauaagcguuggcggagcgucgguuguagcacucugcgcgcccgcucuucugcugcuguuugucuacuuccuccugcuuccccgccgccgccgccgccaucaagcuuaccauggcccugagcaaggugaaacucaacgacacccugaauaaggaucagcuucuguccucuagcaaauacacaauccaaagauccacgggcgacucuauugauacccccaacuaugacguccagaagcacaucaauaaacucugcgggaugcugcuuauuacagaggaugcuaaccauaaguucaccggaguuaucggcaugcuguacgccaugagccggcucgggcgcgaagacacaauuaagauccugagagaugcgggauaucacgugaaagcuaauggcguggacgucaccacacaucggcaggauaucaacgggaaggagaugaaauuugaagugcugacccucgccucccugacgaccgagauucagaucaauauugaaaucgagucucgcaagagcuacaaaaagaugcuuaaggagaugggagaaguugccccugaguauagacacgacuccccggauuguggcaugauuauccugugcauugcugcccucgugaucacaaaacuggcugccggcgaccggagcgggcuuaccgcggucauccgcagagccaacaaugugcugaagaacgaaaugaaacgguacaagggacuccugcccaaagauauugcuaauucuuucuaugagguuuuugagaaguacccucauuucaucgacguguuuguccacuucggcauugcccaauccagcacacgcgggggaucuagaguggaaggcaucuuugcugggcuguucaugaacgccuacggagcgggccaggugaugcuccgguggggcguccuggccaaauccguuaagaauauuaugcuugggcacgcuagcgugcaggccgagauggaacagguggucgagguguaugaauacgcucaaaagcugggaggcgaggccggguuuuaucauauccucaacaaucccaaagccucucugcuuucccugacccaguucccucacuuuagcuccguugugcucggaaacgcugcgggccuggggaucaugggagaguaccgcggcacgcccagaaaccaggaccuguaugaugccgcuaaggccuacgccgaacagcucaaagagaauggcgucauuaacuauucugugcuggaccuuacagcugaggaacuggaagccaucaagcaucaacucaauccuaaagauaacgacguugagcugugaggacuaguguccaccugucccuccugggcugcuggauugucucguuuuccugccaaauaaacaggaucagcgcuuuacagaucuaaaaaaaaaaaaaaaaaaaaaaaaaaaaaaaaaaaaaaaaaaaaaaaaaaaaaaaaaaaaaaaaugcaucccccccccccccccccccccccccccccccaaaggcucuuuucagagccaccagaauu

SEQ ID NO: 20388 - RNA, 1505 nt, Artificial Sequence
  mRNA product Design e-1 comprising derived and/or modified sequence from HRSV(Memphis-37)__AIY60635.1__N (opt6)
gggagaauauaagcguuggcggagcgucgguuguagcacucugcgcgcccgcucuucugcugcuguuugucuacuuccuccugcuuccccgccgccgccgccgccaucaagcuuaccauggccuuaaguaaaguaaaauuaaacgacacacuaaacaaagaccaauuacucucaucaucgaaauauacaauacaaagauccacaggagacuccauagauacaccaaauuacgacguacaaaaacauauaaacaaacucugcggaauguuauuaauaacagaagacgcaaaccacaaauucacaggagucauagguaugcuauacgcaaugucaagauuaggaagagaagauacaauaaaaauacuaagagacgcaggauaccacguaaaagcaaacggaguagacguaacaacacauagacaagauauaaacgguaaagaaaugaaauucgaaguacuaacacuagccagucuaacaacagaaauacaaauaaacauagaaauagaaagccgaaaaucauacaaaaaaauguuaaaagaaaugggggaaguagcacccgaauacagacaugauucaccugacugcggaaugauaauacucugcauagcggcauuagucauaacaaaacuagccgcaggagacagaagcggauuaacagcaguaauaagaagagcaaauaauguauuaaaaaaugaaaugaaaagguauaaaggauuacuaccaaaagauauagcaaacucauucuaugaaguuuucgaaaaauacccacacuucauagacgucuucguacacuuuggaauagcacaaagcagcacaagaggaggaagcagaguagaaggaauauucgcaggacuauucaugaaugcauacggagccggacaaguaaugcuaagauggggaguuuuagcaaaaagcguaaaaaacauaauguuaggacacgccuccguccaagccgaaauggaacaaguaguagaaguauacgaauaugcacaaaaacuaggaggagaagcaggauucuaucacauacucaauaacccaaaagcaucacuauugagcuuaacacaauucccacauuuuucauccguaguccuaggaaaugcagcaggcuuaggaauaaugggagaauacagaggcacaccaagaaaucaagacuuauacgaugcagcaaaagcauacgcagaacaacuaaaagaaaacggaguaauaaacuacucaguauuagauuuaacagcagaagaauuagaagcaauaaaacaucaacuaaauccuaaggauaaugauguagaacucuaaggacuaguguccaccugucccuccugggcugcuggauugucucguuuuccugccaaauaaacaggaucagcgcuuuacagaucuaaaaaaaaaaaaaaaaaaaaaaaaaaaaaaaaaaaaaaaaaaaaaaaaaaaaaaaaaaaaaaaaugcaucccccccccccccccccccccccccccccccaaaggcucuuuucagagccaccagaauu

SEQ ID NO: 20389 - RNA, 1505 nt, Artificial Sequence
  mRNA product Design e-1 comprising derived and/or modified sequence from HRSV(Memphis-37)__AIY60635.1__N (opt11)
gggagaauauaagcguuggcggagcgucgguuguagcacucugcgcgcccgcucuucugcugcuguuugucuacuuccuccugcuuccccgccgccgccgccgccaucaagcuuaccauggcccuaagcaaagucaaacucaacgacacacuaaacaaagaccaacuccucagcuccagcaaauacaccauccaacgauccaccggcgacuccauagacacccccaacuacgacguccaaaaacacaucaacaaacuaugcggcaugcuccuaaucacagaagacgccaaccacaaauucaccggagucaucggcaugcucuacgccaugagccgccucggccgagaagacacaaucaaaauacuaagagacgccggcuaccacguaaaagccaacggcguagacguaaccacccaccgccaagacaucaacggcaaagaaaugaaauucgaaguucucacccucgccucacuaaccacggaaauccaaauaaacauugaaaucgaaagcagaaaauccuacaaaaagaugcuaaaagaaaugggcgagguagccccagaauaccgccacgacagccccgacugcggaaugaucauccucugcauugcagcccucgucaucaccaaacuagccgccggcgacagaagcggccuaaccgcaguaauccgccgagccaacaacguacucaaaaacgaaaugaaacgcuacaaaggccuccuccccaaagacaucgccaacagcuucuacgaaguauucgaaaaauacccgcacuucaucgacgucuucguacacuucggcauagcccaaagcagcacacgaggcggcucccgcgucgaaggaauauucgccggccuguucaugaacgcauacggagcgggccaagucaugcuccgcugggguguacuagccaaguccgucaaaaacaucaugcuagggcacgcaagcguacaagccgaaauggaacaaguagucgaagucuacgaauacgcacaaaaacuaggcggcgaagccggcuucuaccacauccuaaacaaccccaaagccucauuacucucccucacccaauuuccucacuucuccagcgucguccucggaaacgccgccggccuaggcauaaugggggaauaccgcggcaccccgcgcaaccaagaccucuacgacgcagcaaaagccuacgcagaacaacuaaaagaaaacggagucaucaacuacagcguacuggaccuaaccgccgaagaacucgaagccauaaaacaccaacucaaccccaaagacaacgacgucgagcucuaaggacuaguguccaccugucccuccugggcugcuggauugucucguuuuccugccaaauaaacaggaucagcgcuuuacagaucuaaaaaaaaaaaaaaaaaaaaaaaaaaaaaaaaaaaaaaaaaaaaaaaaaaaaaaaaaaaaaaaaugcaucccccccccccccccccccccccccccccccaaaggcucuuuucagagccaccagaauu

SEQ ID NO: 20390 - RNA, 1487 nt, Artificial Sequence
  mRNA product Design e-2 comprising derived and/or modified sequence from HRSV(Memphis-37)__AIY60635.1__N (wt)
gggagacccgugacccggaaguuguacggcuacgcgacuuucccucccacaaacccucgcgcccuuccuuuccuacuugggcccggcagaaagcuuaccauggcucuuagcaaagucaaguugaacgauacacucaacaaagaucaacuucugucauccagcaaauacaccauccaacggagcacaggagauaguauugauacuccuaauuaugaugugcagaaacacaucaacaaguuauguggcauguuauuaaucacagaagaugcuaaucauaaauucacugggguaauagguauguuauaugcuaugucuagauuaggaagagaagacaccauaaaaauacucagagaugcgggauaucauguaaaagcaaauggaguggauguaacaacacaucgucaagacauuaauggaaaagaaaugaaauuugaaguguuaacauuggcaagcuuaacaacugaaauucaaaucaacauugagauagaaucuaggaaauccuacaaaaaaaugcuaaaagaaaugggagagguggcuccagaauacaggcaugacucuccugauuguggaaugauaauauuauguauagcagcauuaguaauaaccaaauuagcagcaggggauagaucuggucuuacugcugugauuaggagagcuaauaauguucuaaaaaaugaaaugaaacguuauaaaggcuuacuaccaaaggauauagccaacagcuucuaugaaguguuugaaaaauauccucacuuuauagauguuuuuguucauuuugguauagcacaaucuucuaccagagguggcaguagaguugaagggauuuuugcaggauuguuuaugaaugccuauggugcagggcaagugauguuacgguggggagucuuagcaaaaucaguuaaaaauauuaugcuaggacaugcuagugugcaagcagaaauggaacaaguuguggaaguuuaugaauaugcccaaaaauuggguggagaagcaggauucuaccauauauugaacaauccaaaagcaucauuauuaucuuugacucaauuuccccacuucuccaguguaguauugggcaaugcugcuggccuaggcauaaugggagaauacagagguacaccaaggaaucaagaucuauaugaugcugcaaaggcauaugcugaacaacucaaagaaaauggugugauuaacuacaguguauuagacuugacagcagaagaacuagaggcuaucaaacaucagcuuaauccaaaagauaaugauguagagcuuugaggacuaguguccaccugucccuccugggcugcuggauugucucguuuuccugccaaauaaacaggaucagcgcuuuacagaucuaaaaaaaaaaaaaaaaaaaaaaaaaaaaaaaaaaaaaaaaaaaaaaaaaaaaaaaaaaaaaaaaugcaucccccccccccccccccccccccccccccccaaaggcucuuuucagagccaccagaauu

SEQ ID NO: 20391 - RNA, 1487 nt, Artificial Sequence
  mRNA product Design e-2 comprising derived and/or modified sequence from HRSV(Memphis-37)__AIY60635.1__N (opt1)
gggagacccgugacccggaaguuguacggcuacgcgacuuucccucccacaaacccucgcgcccuuccuuuccuacuugggcccggcagaaagcuuaccauggcccugagcaaggugaagcucaacgacacccugaacaaggaccagcugcucuccagcuccaaguacaccauccagcgcagcaccggcgacuccaucgacacccccaacuacgacguccagaagcacaucaacaagcugugcgggaugcugcucaucaccgaggacgccaaccacaaguucaccggcgugaucgggaugcuguacgcgaugagccggcugggccgcgaggacacgaucaagauccuccgggacgccggguaccacgugaaggccaacggcgucgacgugaccacccaccgccaggacaucaacggcaaggagaugaaguucgaggugcugacccuggccucccucacgaccgagauccagaucaacaucgagaucgagagccggaaguccuacaagaagaugcugaaggagaugggggaggucgccccggaguaccgccacgacagccccgacugcggcaugaucauccugugcaucgcggcccucgugaucaccaagcuggccgccggggaccgguccggccugaccgcggugauccgccgggccaacaacguccucaagaacgagaugaagcgcuacaaggggcugcugcccaaggacaucgccaacagcuucuacgagguguucgagaaguacccccacuucaucgacguguucguccacuucggcaucgcccaguccagcacgcggggcgggucccgcguggagggcaucuucgccgggcuguucaugaacgcguacggcgccggccaggugaugcugcgguggggcguccuggccaagagcgugaagaacaucaugcucgggcacgccuccgugcaggccgagauggagcaggucguggagguguacgaguacgcgcagaagcucgggggcgaggccggguucuaccacauccugaacaacccgaaggccagccuccugucccugacccaguucccccacuucagcagcgucgugcucggcaacgccgccggccuggggaucaugggcgaguaccgcgggacgccccggaaccaggaccuguacgacgcggccaaggccuacgccgagcagcucaaggagaacggcgugaucaacuacuccguccuggaccugaccgccgaggagcucgaggcgaucaagcaccagcugaaccccaaggacaacgacguggagcugugaggacuaguguccaccugucccuccugggcugcuggauugucucguuuuccugccaaauaaacaggaucagcgcuuuacagaucuaaaaaaaaaaaaaaaaaaaaaaaaaaaaaaaaaaaaaaaaaaaaaaaaaaaaaaaaaaaaaaaaugcaucccccccccccccccccccccccccccccccaaaggcucuuuucagagccaccagaauu

SEQ ID NO: 20392 - RNA, 1487 nt, Artificial Sequence
  mRNA product Design e-2 comprising derived and/or modified sequence from HRSV(Memphis-37)__AIY60635.1__N (opt2)
gggagacccgugacccggaaguuguacggcuacgcgacuuucccucccacaaacccucgcgcccuuccuuuccuacuugggcccggcagaaagcuuaccauggcccucuccaaggucaagcucaacgacacccucaacaaggaccagcuccucuccuccuccaaguacaccauccagcgcuccaccggcgacuccaucgacacccccaacuacgacguccagaagcacaucaacaagcucugcggcaugcuccucaucaccgaggacgccaaccacaaguucaccggcgucaucggcaugcucuacgccaugucccgccucggccgcgaggacaccaucaagauccuccgcgacgccggcuaccacgucaaggccaacggcgucgacgucaccacccaccgccaggacaucaacggcaaggagaugaaguucgagguccucacccucgccucccucaccaccgagauccagaucaacaucgagaucgagucccgcaaguccuacaagaagaugcucaaggagaugggcgaggucgcccccgaguaccgccacgacucccccgacugcggcaugaucauccucugcaucgccgcccucgucaucaccaagcucgccgccggcgaccgcuccggccucaccgccgucauccgccgcgccaacaacguccucaagaacgagaugaagcgcuacaagggccuccuccccaaggacaucgccaacuccuucuacgaggucuucgagaaguacccccacuucaucgacgucuucguccacuucggcaucgcccaguccuccacccgcggcggcucccgcgucgagggcaucuucgccggccucuucaugaacgccuacggcgccggccaggucaugcuccgcuggggcguccucgccaaguccgucaagaacaucaugcucggccacgccuccguccaggccgagauggagcaggucgucgaggucuacgaguacgcccagaagcucggcggcgaggccggcuucuaccacauccucaacaaccccaaggccucccuccucucccucacccaguucccccacuucuccuccgucguccucggcaacgccgccggccucggcaucaugggcgaguaccgcggcaccccccgcaaccaggaccucuacgacgccgccaaggccuacgccgagcagcucaaggagaacggcgucaucaacuacuccguccucgaccucaccgccgaggagcucgaggccaucaagcaccagcucaaccccaaggacaacgacgucgagcucugaggacuaguguccaccugucccuccugggcugcuggauugucucguuuuccugccaaauaaacaggaucagcgcuuuacagaucuaaaaaaaaaaaaaaaaaaaaaaaaaaaaaaaaaaaaaaaaaaaaaaaaaaaaaaaaaaaaaaaaugcaucccccccccccccccccccccccccccccccaaaggcucuuuucagagccaccagaauu

SEQ ID NO: 20393 - RNA, 1487 nt, Artificial Sequence
  mRNA product Design e-2 comprising derived and/or modified sequence from HRSV(Memphis-37)__AIY60635.1__N (opt3)
gggagacccgugacccggaaguuguacggcuacgcgacuuucccucccacaaacccucgcgcccuuccuuuccuacuugggcccggcagaaagcuuaccauggcccugagcaaggugaaacucaacgacacccuuaauaaggaucagcuguuguccucuucaaaauacacaauccaaagaaguacuggcgacagcauugauacgcccaacuaugacguccagaagcacauaaauaaauuaugcgggaugcugcuaaucaccgaggaugcuaaccauaaguucacaggaguuauugguaugcucuacgcaauguccaggcugggccgggaagacacuaucaagauucuucgcgaugccggguaucacgugaaagcgaauggaguagacgugaccacacaucgacaggauaucaacggcaaggagaugaaauuugaaguccugaccuuggcuucucucacuacagagauacagaucaauauugaaaucgagucgcguaagucauacaaaaagaugcugaaggagaugggugaaguggccccugaguauagacacgacagcccagauugugggaugauuauccugugcauagcagcccucguuauuaccaaauuagcugcaggagacaggaguggccugacggccgugauccggcgcgcuaacaauguccuuaagaacgaaaugaaaagauacaagggcuugcugccgaaagauauugccaauuccuucuaugagguguuugagaaguacccccauuucaucgacguauuuguucacuucgggaucgcgcaaucuagcacuaggggagguucccggguggaaggcauuuuugcagggcuauucaugaacgccuacggagcuggccaggucaugcuccgcuggggugugcuggccaaaucagugaagaauauaaugcuugggcacgcaaguguccaggcugagauggaacagguuguggagguauaugaauacgcccaaaagcugggaggcgaggcgggcuuuuaucauaucuugaacaauccuaaagccagccuccugucuuuaacccaguucccacacuuuuccucagugguccuggggaacgcagcuggacucgguauuaugggcgaguaccgagggacacccagaaaccaggaccuuuaugaugccgcuaaggccuacgcagaacagcugaaagagaauggagugaucaacuauagcguuuuggaccuaacugccgaggaacuggaagcuauaaagcaucaacucaauccuaaagauaacgacguggagcugugaggacuaguguccaccugucccuccugggcugcuggauugucucguuuuccugccaaauaaacaggaucagcgcuuuacagaucuaaaaaaaaaaaaaaaaaaaaaaaaaaaaaaaaaaaaaaaaaaaaaaaaaaaaaaaaaaaaaaaaugcaucccccccccccccccccccccccccccccccaaaggcucuuuucagagccaccagaauu

SEQ ID NO: 20394 - RNA, 1487 nt, Artificial Sequence
  mRNA product Design e-2 comprising derived and/or modified sequence from HRSV(Memphis-37)__AIY60635.1__N (opt4)
gggagacccgugacccggaaguuguacggcuacgcgacuuucccucccacaaacccucgcgcccuuccuuuccuacuugggcccggcagaaagcuuaccauggcccugagcaaggugaagcugaacgacacccugaacaaggaccagcugcugagcagcagcaaguacaccauccagagaagcaccggcgacagcaucgacacccccaacuacgacgugcagaagcacaucaacaagcugugcggcaugcugcugaucaccgaggacgccaaccacaaguucaccggcgugaucggcaugcuguacgccaugagcagacugggcagagaggacaccaucaagauccugagagacgccggcuaccacgugaaggccaacggcguggacgugaccacccacagacaggacaucaacggcaaggagaugaaguucgaggugcugacccuggccagccugaccaccgagauccagaucaacaucgagaucgagagcagaaagagcuacaagaagaugcugaaggagaugggcgagguggcccccgaguacagacacgacagccccgacugcggcaugaucauccugugcaucgccgcccuggugaucaccaagcuggccgccggcgacagaagcggccugaccgccgugaucagaagagccaacaacgugcugaagaacgagaugaagagauacaagggccugcugcccaaggacaucgccaacagcuucuacgagguguucgagaaguacccccacuucaucgacguguucgugcacuucggcaucgcccagagcagcaccagaggcggcagcagaguggagggcaucuucgccggccuguucaugaacgccuacggcgccggccaggugaugcugagauggggcgugcuggccaagagcgugaagaacaucaugcugggccacgccagcgugcaggccgagauggagcaggugguggagguguacgaguacgcccagaagcugggcggcgaggccggcuucuaccacauccugaacaaccccaaggccagccugcugagccugacccaguucccccacuucagcagcguggugcugggcaacgccgccggccugggcaucaugggcgaguacagaggcacccccagaaaccaggaccuguacgacgccgccaaggccuacgccgagcagcugaaggagaacggcgugaucaacuacagcgugcuggaccugaccgccgaggagcuggaggccaucaagcaccagcugaaccccaaggacaacgacguggagcugugaggacuaguguccaccugucccuccugggcugcuggauugucucguuuuccugccaaauaaacaggaucagcgcuuuacagaucuaaaaaaaaaaaaaaaaaaaaaaaaaaaaaaaaaaaaaaaaaaaaaaaaaaaaaaaaaaaaaaaaugcaucccccccccccccccccccccccccccccccaaaggcucuuuucagagccaccagaauu

SEQ ID NO: 20395 - RNA, 1487 nt, Artificial Sequence
  mRNA product Design e-2 comprising derived and/or modified sequence from HRSV(Memphis-37)__AIY60635.1__N (opt5)
gggagacccgugacccggaaguuguacggcuacgcgacuuucccucccacaaacccucgcgcccuuccuuuccuacuugggcccggcagaaagcuuaccauggcccugagcaaggugaaacucaacgacacccugaauaaggaucagcuucuguccucuagcaaauacacaauccaaagauccacgggcgacucuauugauacccccaacuaugacguccagaagcacaucaauaaacucugcgggaugcugcuuauuacagaggaugcuaaccauaaguucaccggaguuaucggcaugcuguacgccaugagccggcucgggcgcgaagacacaauuaagauccugagagaugcgggauaucacgugaaagcuaauggcguggacgucaccacacaucggcaggauaucaacgggaaggagaugaaauuugaagugcugacccucgccucccugacgaccgagauucagaucaauauugaaaucgagucucgcaagagcuacaaaaagaugcuuaaggagaugggagaaguugccccugaguauagacacgacuccccggauuguggcaugauuauccugugcauugcugcccucgugaucacaaaacuggcugccggcgaccggagcgggcuuaccgcggucauccgcagagccaacaaugugcugaagaacgaaaugaaacgguacaagggacuccugcccaaagauauugcuaauucuuucuaugagguuuuugagaaguacccucauuucaucgacguguuuguccacuucggcauugcccaauccagcacacgcgggggaucuagaguggaaggcaucuuugcugggcuguucaugaacgccuacggagcgggccaggugaugcuccgguggggcguccuggccaaauccguuaagaauauuaugcuugggcacgcuagcgugcaggccgagauggaacagguggucgagguguaugaauacgcucaaaagcugggaggcgaggccggguuuuaucauauccucaacaaucccaaagccucucugcuuucccugacccaguucccucacuuuagcuccguugugcucggaaacgcugcgggccuggggaucaugggagaguaccgcggcacgcccagaaaccaggaccuguaugaugccgcuaaggccuacgccgaacagcucaaagagaauggcgucauuaacuauucugugcuggaccuuacagcugaggaacuggaagccaucaagcaucaacucaauccuaaagauaacgacguugagcugugaggacuaguguccaccugucccuccugggcugcuggauugucucguuuuccugccaaauaaacaggaucagcgcuuuacagaucuaaaaaaaaaaaaaaaaaaaaaaaaaaaaaaaaaaaaaaaaaaaaaaaaaaaaaaaaaaaaaaaaugcaucccccccccccccccccccccccccccccccaaaggcucuuuucagagccaccagaauu

SEQ ID NO: 20396 - RNA, 1487 nt, Artificial Sequence
  mRNA product Design e-2 comprising derived and/or modified sequence from HRSV(Memphis-37)__AIY60635.1__N (opt6)
gggagacccgugacccggaaguuguacggcuacgcgacuuucccucccacaaacccucgcgcccuuccuuuccuacuugggcccggcagaaagcuuaccauggccuuaaguaaaguaaaauuaaacgacacacuaaacaaagaccaauuacucucaucaucgaaauauacaauacaaagauccacaggagacuccauagauacaccaaauuacgacguacaaaaacauauaaacaaacucugcggaauguuauuaauaacagaagacgcaaaccacaaauucacaggagucauagguaugcuauacgcaaugucaagauuaggaagagaagauacaauaaaaauacuaagagacgcaggauaccacguaaaagcaaacggaguagacguaacaacacauagacaagauauaaacgguaaagaaaugaaauucgaaguacuaacacuagccagucuaacaacagaaauacaaauaaacauagaaauagaaagccgaaaaucauacaaaaaaauguuaaaagaaaugggggaaguagcacccgaauacagacaugauucaccugacugcggaaugauaauacucugcauagcggcauuagucauaacaaaacuagccgcaggagacagaagcggauuaacagcaguaauaagaagagcaaauaauguauuaaaaaaugaaaugaaaagguauaaaggauuacuaccaaaagauauagcaaacucauucuaugaaguuuucgaaaaauacccacacuucauagacgucuucguacacuuuggaauagcacaaagcagcacaagaggaggaagcagaguagaaggaauauucgcaggacuauucaugaaugcauacggagccggacaaguaaugcuaagauggggaguuuuagcaaaaagcguaaaaaacauaauguuaggacacgccuccguccaagccgaaauggaacaaguaguagaaguauacgaauaugcacaaaaacuaggaggagaagcaggauucuaucacauacucaauaacccaaaagcaucacuauugagcuuaacacaauucccacauuuuucauccguaguccuaggaaaugcagcaggcuuaggaauaaugggagaauacagaggcacaccaagaaaucaagacuuauacgaugcagcaaaagcauacgcagaacaacuaaaagaaaacggaguaauaaacuacucaguauuagauuuaacagcagaagaauuagaagcaauaaaacaucaacuaaauccuaaggauaaugauguagaacucuaaggacuaguguccaccugucccuccugggcugcuggauugucucguuuuccugccaaauaaacaggaucagcgcuuuacagaucuaaaaaaaaaaaaaaaaaaaaaaaaaaaaaaaaaaaaaaaaaaaaaaaaaaaaaaaaaaaaaaaaugcaucccccccccccccccccccccccccccccccaaaggcucuuuucagagccaccagaauu

SEQ ID NO: 20397 - RNA, 1487 nt, Artificial Sequence
  mRNA product Design e-2 comprising derived and/or modified sequence from HRSV(Memphis-37)__AIY60635.1__N (opt11)
gggagacccgugacccggaaguuguacggcuacgcgacuuucccucccacaaacccucgcgcccuuccuuuccuacuugggcccggcagaaagcuuaccauggcccuaagcaaagucaaacucaacgacacacuaaacaaagaccaacuccucagcuccagcaaauacaccauccaacgauccaccggcgacuccauagacacccccaacuacgacguccaaaaacacaucaacaaacuaugcggcaugcuccuaaucacagaagacgccaaccacaaauucaccggagucaucggcaugcucuacgccaugagccgccucggccgagaagacacaaucaaaauacuaagagacgccggcuaccacguaaaagccaacggcguagacguaaccacccaccgccaagacaucaacggcaaagaaaugaaauucgaaguucucacccucgccucacuaaccacggaaauccaaauaaacauugaaaucgaaagcagaaaauccuacaaaaagaugcuaaaagaaaugggcgagguagccccagaauaccgccacgacagccccgacugcggaaugaucauccucugcauugcagcccucgucaucaccaaacuagccgccggcgacagaagcggccuaaccgcaguaauccgccgagccaacaacguacucaaaaacgaaaugaaacgcuacaaaggccuccuccccaaagacaucgccaacagcuucuacgaaguauucgaaaaauacccgcacuucaucgacgucuucguacacuucggcauagcccaaagcagcacacgaggcggcucccgcgucgaaggaauauucgccggccuguucaugaacgcauacggagcgggccaagucaugcuccgcugggguguacuagccaaguccgucaaaaacaucaugcuagggcacgcaagcguacaagccgaaauggaacaaguagucgaagucuacgaauacgcacaaaaacuaggcggcgaagccggcuucuaccacauccuaaacaaccccaaagccucauuacucucccucacccaauuuccucacuucuccagcgucguccucggaaacgccgccggccuaggcauaaugggggaauaccgcggcaccccgcgcaaccaagaccucuacgacgcagcaaaagccuacgcagaacaacuaaaagaaaacggagucaucaacuacagcguacuggaccuaaccgccgaagaacucgaagccauaaaacaccaacucaaccccaaagacaacgacgucgagcucuaaggacuaguguccaccugucccuccugggcugcuggauugucucguuuuccugccaaauaaacaggaucagcgcuuuacagaucuaaaaaaaaaaaaaaaaaaaaaaaaaaaaaaaaaaaaaaaaaaaaaaaaaaaaaaaaaaaaaaaaugcaucccccccccccccccccccccccccccccccaaaggcucuuuucagagccaccagaauu

SEQ ID NO: 20398 - RNA, 1457 nt, Artificial Sequence
  mRNA product Design e-3 comprising derived and/or modified sequence from HRSV(Memphis-37)__AIY60635.1__N (wt)
gggagacuuucccauucuguagcagaauuugguguugccuguggucuuggucccgcggagaagcuuaccauggcucuuagcaaagucaaguugaacgauacacucaacaaagaucaacuucugucauccagcaaauacaccauccaacggagcacaggagauaguauugauacuccuaauuaugaugugcagaaacacaucaacaaguuauguggcauguuauuaaucacagaagaugcuaaucauaaauucacugggguaauagguauguuauaugcuaugucuagauuaggaagagaagacaccauaaaaauacucagagaugcgggauaucauguaaaagcaaauggaguggauguaacaacacaucgucaagacauuaauggaaaagaaaugaaauuugaaguguuaacauuggcaagcuuaacaacugaaauucaaaucaacauugagauagaaucuaggaaauccuacaaaaaaaugcuaaaagaaaugggagagguggcuccagaauacaggcaugacucuccugauuguggaaugauaauauuauguauagcagcauuaguaauaaccaaauuagcagcaggggauagaucuggucuuacugcugugauuaggagagcuaauaauguucuaaaaaaugaaaugaaacguuauaaaggcuuacuaccaaaggauauagccaacagcuucuaugaaguguuugaaaaauauccucacuuuauagauguuuuuguucauuuugguauagcacaaucuucuaccagagguggcaguagaguugaagggauuuuugcaggauuguuuaugaaugccuauggugcagggcaagugauguuacgguggggagucuuagcaaaaucaguuaaaaauauuaugcuaggacaugcuagugugcaagcagaaauggaacaaguuguggaaguuuaugaauaugcccaaaaauuggguggagaagcaggauucuaccauauauugaacaauccaaaagcaucauuauuaucuuugacucaauuuccccacuucuccaguguaguauugggcaaugcugcuggccuaggcauaaugggagaauacagagguacaccaaggaaucaagaucuauaugaugcugcaaaggcauaugcugaacaacucaaagaaaauggugugauuaacuacaguguauuagacuugacagcagaagaacuagaggcuaucaaacaucagcuuaauccaaaagauaaugauguagagcuuugaggacuaguguccaccugucccuccugggcugcuggauugucucguuuuccugccaaauaaacaggaucagcgcuuuacagaucuaaaaaaaaaaaaaaaaaaaaaaaaaaaaaaaaaaaaaaaaaaaaaaaaaaaaaaaaaaaaaaaaugcaucccccccccccccccccccccccccccccccaaaggcucuuuucagagccaccagaauu

SEQ ID NO: 20399 - RNA, 1457 nt, Artificial Sequence
  mRNA product Design e-3 comprising derived and/or modified sequence from HRSV(Memphis-37)__AIY60635.1__N (opt1)
gggagacuuucccauucuguagcagaauuugguguugccuguggucuuggucccgcggagaagcuuaccauggcccugagcaaggugaagcucaacgacacccugaacaaggaccagcugcucuccagcuccaaguacaccauccagcgcagcaccggcgacuccaucgacacccccaacuacgacguccagaagcacaucaacaagcugugcgggaugcugcucaucaccgaggacgccaaccacaaguucaccggcgugaucgggaugcuguacgcgaugagccggcugggccgcgaggacacgaucaagauccuccgggacgccggguaccacgugaaggccaacggcgucgacgugaccacccaccgccaggacaucaacggcaaggagaugaaguucgaggugcugacccuggccucccucacgaccgagauccagaucaacaucgagaucgagagccggaaguccuacaagaagaugcugaaggagaugggggaggucgccccggaguaccgccacgacagccccgacugcggcaugaucauccugugcaucgcggcccucgugaucaccaagcuggccgccggggaccgguccggccugaccgcggugauccgccgggccaacaacguccucaagaacgagaugaagcgcuacaaggggcugcugcccaaggacaucgccaacagcuucuacgagguguucgagaaguacccccacuucaucgacguguucguccacuucggcaucgcccaguccagcacgcggggcgggucccgcguggagggcaucuucgccgggcuguucaugaacgcguacggcgccggccaggugaugcugcgguggggcguccuggccaagagcgugaagaacaucaugcucgggcacgccuccgugcaggccgagauggagcaggucguggagguguacgaguacgcgcagaagcucgggggcgaggccggguucuaccacauccugaacaacccgaaggccagccuccugucccugacccaguucccccacuucagcagcgucgugcucggcaacgccgccggccuggggaucaugggcgaguaccgcgggacgccccggaaccaggaccuguacgacgcggccaaggccuacgccgagcagcucaaggagaacggcgugaucaacuacuccguccuggaccugaccgccgaggagcucgaggcgaucaagcaccagcugaaccccaaggacaacgacguggagcugugaggacuaguguccaccugucccuccugggcugcuggauugucucguuuuccugccaaauaaacaggaucagcgcuuuacagaucuaaaaaaaaaaaaaaaaaaaaaaaaaaaaaaaaaaaaaaaaaaaaaaaaaaaaaaaaaaaaaaaaugcaucccccccccccccccccccccccccccccccaaaggcucuuuucagagccaccagaauu

SEQ ID NO: 20400 - RNA, 1457 nt, Artificial Sequence
  mRNA product Design e-3 comprising derived and/or modified sequence from HRSV(Memphis-37)__AIY60635.1__N (opt2)
gggagacuuucccauucuguagcagaauuugguguugccuguggucuuggucccgcggagaagcuuaccauggcccucuccaaggucaagcucaacgacacccucaacaaggaccagcuccucuccuccuccaaguacaccauccagcgcuccaccggcgacuccaucgacacccccaacuacgacguccagaagcacaucaacaagcucugcggcaugcuccucaucaccgaggacgccaaccacaaguucaccggcgucaucggcaugcucuacgccaugucccgccucggccgcgaggacaccaucaagauccuccgcgacgccggcuaccacgucaaggccaacggcgucgacgucaccacccaccgccaggacaucaacggcaaggagaugaaguucgagguccucacccucgccucccucaccaccgagauccagaucaacaucgagaucgagucccgcaaguccuacaagaagaugcucaaggagaugggcgaggucgcccccgaguaccgccacgacucccccgacugcggcaugaucauccucugcaucgccgcccucgucaucaccaagcucgccgccggcgaccgcuccggccucaccgccgucauccgccgcgccaacaacguccucaagaacgagaugaagcgcuacaagggccuccuccccaaggacaucgccaacuccuucuacgaggucuucgagaaguacccccacuucaucgacgucuucguccacuucggcaucgcccaguccuccacccgcggcggcucccgcgucgagggcaucuucgccggccucuucaugaacgccuacggcgccggccaggucaugcuccgcuggggcguccucgccaaguccgucaagaacaucaugcucggccacgccuccguccaggccgagauggagcaggucgucgaggucuacgaguacgcccagaagcucggcggcgaggccggcuucuaccacauccucaacaaccccaaggccucccuccucucccucacccaguucccccacuucuccuccgucguccucggcaacgccgccggccucggcaucaugggcgaguaccgcggcaccccccgcaaccaggaccucuacgacgccgccaaggccuacgccgagcagcucaaggagaacggcgucaucaacuacuccguccucgaccucaccgccgaggagcucgaggccaucaagcaccagcucaaccccaaggacaacgacgucgagcucugaggacuaguguccaccugucccuccugggcugcuggauugucucguuuuccugccaaauaaacaggaucagcgcuuuacagaucuaaaaaaaaaaaaaaaaaaaaaaaaaaaaaaaaaaaaaaaaaaaaaaaaaaaaaaaaaaaaaaaaugcaucccccccccccccccccccccccccccccccaaaggcucuuuucagagccaccagaauu

SEQ ID NO: 20401 - RNA, 1457 nt, Artificial Sequence
  mRNA product Design e-3 comprising derived and/or modified sequence from HRSV(Memphis-37)__AIY60635.1__N (opt3)
gggagacuuucccauucuguagcagaauuugguguugccuguggucuuggucccgcggagaagcuuaccauggcccugagcaaggugaaacucaacgacacccuuaauaaggaucagcuguuguccucuucaaaauacacaauccaaagaaguacuggcgacagcauugauacgcccaacuaugacguccagaagcacauaaauaaauuaugcgggaugcugcuaaucaccgaggaugcuaaccauaaguucacaggaguuauugguaugcucuacgcaauguccaggcugggccgggaagacacuaucaagauucuucgcgaugccggguaucacgugaaagcgaauggaguagacgugaccacacaucgacaggauaucaacggcaaggagaugaaauuugaaguccugaccuuggcuucucucacuacagagauacagaucaauauugaaaucgagucgcguaagucauacaaaaagaugcugaaggagaugggugaaguggccccugaguauagacacgacagcccagauugugggaugauuauccugugcauagcagcccucguuauuaccaaauuagcugcaggagacaggaguggccugacggccgugauccggcgcgcuaacaauguccuuaagaacgaaaugaaaagauacaagggcuugcugccgaaagauauugccaauuccuucuaugagguguuugagaaguacccccauuucaucgacguauuuguucacuucgggaucgcgcaaucuagcacuaggggagguucccggguggaaggcauuuuugcagggcuauucaugaacgccuacggagcuggccaggucaugcuccgcuggggugugcuggccaaaucagugaagaauauaaugcuugggcacgcaaguguccaggcugagauggaacagguuguggagguauaugaauacgcccaaaagcugggaggcgaggcgggcuuuuaucauaucuugaacaauccuaaagccagccuccugucuuuaacccaguucccacacuuuuccucagugguccuggggaacgcagcuggacucgguauuaugggcgaguaccgagggacacccagaaaccaggaccuuuaugaugccgcuaaggccuacgcagaacagcugaaagagaauggagugaucaacuauagcguuuuggaccuaacugccgaggaacuggaagcuauaaagcaucaacucaauccuaaagauaacgacguggagcugugaggacuaguguccaccugucccuccugggcugcuggauugucucguuuuccugccaaauaaacaggaucagcgcuuuacagaucuaaaaaaaaaaaaaaaaaaaaaaaaaaaaaaaaaaaaaaaaaaaaaaaaaaaaaaaaaaaaaaaaugcaucccccccccccccccccccccccccccccccaaaggcucuuuucagagccaccagaauu

SEQ ID NO: 20402 - RNA, 1457 nt, Artificial Sequence
  mRNA product Design e-3 comprising derived and/or modified sequence from HRSV(Memphis-37)__AIY60635.1__N (opt4)
gggagacuuucccauucuguagcagaauuugguguugccuguggucuuggucccgcggagaagcuuaccauggcccugagcaaggugaagcugaacgacacccugaacaaggaccagcugcugagcagcagcaaguacaccauccagagaagcaccggcgacagcaucgacacccccaacuacgacgugcagaagcacaucaacaagcugugcggcaugcugcugaucaccgaggacgccaaccacaaguucaccggcgugaucggcaugcuguacgccaugagcagacugggcagagaggacaccaucaagauccugagagacgccggcuaccacgugaaggccaacggcguggacgugaccacccacagacaggacaucaacggcaaggagaugaaguucgaggugcugacccuggccagccugaccaccgagauccagaucaacaucgagaucgagagcagaaagagcuacaagaagaugcugaaggagaugggcgagguggcccccgaguacagacacgacagccccgacugcggcaugaucauccugugcaucgccgcccuggugaucaccaagcuggccgccggcgacagaagcggccugaccgccgugaucagaagagccaacaacgugcugaagaacgagaugaagagauacaagggccugcugcccaaggacaucgccaacagcuucuacgagguguucgagaaguacccccacuucaucgacguguucgugcacuucggcaucgcccagagcagcaccagaggcggcagcagaguggagggcaucuucgccggccuguucaugaacgccuacggcgccggccaggugaugcugagauggggcgugcuggccaagagcgugaagaacaucaugcugggccacgccagcgugcaggccgagauggagcaggugguggagguguacgaguacgcccagaagcugggcggcgaggccggcuucuaccacauccugaacaaccccaaggccagccugcugagccugacccaguucccccacuucagcagcguggugcugggcaacgccgccggccugggcaucaugggcgaguacagaggcacccccagaaaccaggaccuguacgacgccgccaaggccuacgccgagcagcugaaggagaacggcgugaucaacuacagcgugcuggaccugaccgccgaggagcuggaggccaucaagcaccagcugaaccccaaggacaacgacguggagcugugaggacuaguguccaccugucccuccugggcugcuggauugucucguuuuccugccaaauaaacaggaucagcgcuuuacagaucuaaaaaaaaaaaaaaaaaaaaaaaaaaaaaaaaaaaaaaaaaaaaaaaaaaaaaaaaaaaaaaaaugcaucccccccccccccccccccccccccccccccaaaggcucuuuucagagccaccagaauu

SEQ ID NO: 20403 - RNA, 1457 nt, Artificial Sequence
  mRNA product Design e-3 comprising derived and/or modified sequence from HRSV(Memphis-37)__AIY60635.1__N (opt5)
gggagacuuucccauucuguagcagaauuugguguugccuguggucuuggucccgcggagaagcuuaccauggcccugagcaaggugaaacucaacgacacccugaauaaggaucagcuucuguccucuagcaaauacacaauccaaagauccacgggcgacucuauugauacccccaacuaugacguccagaagcacaucaauaaacucugcgggaugcugcuuauuacagaggaugcuaaccauaaguucaccggaguuaucggcaugcuguacgccaugagccggcucgggcgcgaagacacaauuaagauccugagagaugcgggauaucacgugaaagcuaauggcguggacgucaccacacaucggcaggauaucaacgggaaggagaugaaauuugaagugcugacccucgccucccugacgaccgagauucagaucaauauugaaaucgagucucgcaagagcuacaaaaagaugcuuaaggagaugggagaaguugccccugaguauagacacgacuccccggauuguggcaugauuauccugugcauugcugcccucgugaucacaaaacuggcugccggcgaccggagcgggcuuaccgcggucauccgcagagccaacaaugugcugaagaacgaaaugaaacgguacaagggacuccugcccaaagauauugcuaauucuuucuaugagguuuuugagaaguacccucauuucaucgacguguuuguccacuucggcauugcccaauccagcacacgcgggggaucuagaguggaaggcaucuuugcugggcuguucaugaacgccuacggagcgggccaggugaugcuccgguggggcguccuggccaaauccguuaagaauauuaugcuugggcacgcuagcgugcaggccgagauggaacagguggucgagguguaugaauacgcucaaaagcugggaggcgaggccggguuuuaucauauccucaacaaucccaaagccucucugcuuucccugacccaguucccucacuuuagcuccguugugcucggaaacgcugcgggccuggggaucaugggagaguaccgcggcacgcccagaaaccaggaccuguaugaugccgcuaaggccuacgccgaacagcucaaagagaauggcgucauuaacuauucugugcuggaccuuacagcugaggaacuggaagccaucaagcaucaacucaauccuaaagauaacgacguugagcugugaggacuaguguccaccugucccuccugggcugcuggauugucucguuuuccugccaaauaaacaggaucagcgcuuuacagaucuaaaaaaaaaaaaaaaaaaaaaaaaaaaaaaaaaaaaaaaaaaaaaaaaaaaaaaaaaaaaaaaaugcaucccccccccccccccccccccccccccccccaaaggcucuuuucagagccaccagaauu

SEQ ID NO: 20404 - RNA, 1457 nt, Artificial Sequence
  mRNA product Design e-3 comprising derived and/or modified sequence from HRSV(Memphis-37)__AIY60635.1__N (opt6)
gggagacuuucccauucuguagcagaauuugguguugccuguggucuuggucccgcggagaagcuuaccauggccuuaaguaaaguaaaauuaaacgacacacuaaacaaagaccaauuacucucaucaucgaaauauacaauacaaagauccacaggagacuccauagauacaccaaauuacgacguacaaaaacauauaaacaaacucugcggaauguuauuaauaacagaagacgcaaaccacaaauucacaggagucauagguaugcuauacgcaaugucaagauuaggaagagaagauacaauaaaaauacuaagagacgcaggauaccacguaaaagcaaacggaguagacguaacaacacauagacaagauauaaacgguaaagaaaugaaauucgaaguacuaacacuagccagucuaacaacagaaauacaaauaaacauagaaauagaaagccgaaaaucauacaaaaaaauguuaaaagaaaugggggaaguagcacccgaauacagacaugauucaccugacugcggaaugauaauacucugcauagcggcauuagucauaacaaaacuagccgcaggagacagaagcggauuaacagcaguaauaagaagagcaaauaauguauuaaaaaaugaaaugaaaagguauaaaggauuacuaccaaaagauauagcaaacucauucuaugaaguuuucgaaaaauacccacacuucauagacgucuucguacacuuuggaauagcacaaagcagcacaagaggaggaagcagaguagaaggaauauucgcaggacuauucaugaaugcauacggagccggacaaguaaugcuaagauggggaguuuuagcaaaaagcguaaaaaacauaauguuaggacacgccuccguccaagccgaaauggaacaaguaguagaaguauacgaauaugcacaaaaacuaggaggagaagcaggauucuaucacauacucaauaacccaaaagcaucacuauugagcuuaacacaauucccacauuuuucauccguaguccuaggaaaugcagcaggcuuaggaauaaugggagaauacagaggcacaccaagaaaucaagacuuauacgaugcagcaaaagcauacgcagaacaacuaaaagaaaacggaguaauaaacuacucaguauuagauuuaacagcagaagaauuagaagcaauaaaacaucaacuaaauccuaaggauaaugauguagaacucuaaggacuaguguccaccugucccuccugggcugcuggauugucucguuuuccugccaaauaaacaggaucagcgcuuuacagaucuaaaaaaaaaaaaaaaaaaaaaaaaaaaaaaaaaaaaaaaaaaaaaaaaaaaaaaaaaaaaaaaaugcaucccccccccccccccccccccccccccccccaaaggcucuuuucagagccaccagaauu

SEQ ID NO: 20405 - RNA, 1457 nt, Artificial Sequence
  mRNA product Design e-3 comprising derived and/or modified sequence from HRSV(Memphis-37)__AIY60635.1__N (opt11)
gggagacuuucccauucuguagcagaauuugguguugccuguggucuuggucccgcggagaagcuuaccauggcccuaagcaaagucaaacucaacgacacacuaaacaaagaccaacuccucagcuccagcaaauacaccauccaacgauccaccggcgacuccauagacacccccaacuacgacguccaaaaacacaucaacaaacuaugcggcaugcuccuaaucacagaagacgccaaccacaaauucaccggagucaucggcaugcucuacgccaugagccgccucggccgagaagacacaaucaaaauacuaagagacgccggcuaccacguaaaagccaacggcguagacguaaccacccaccgccaagacaucaacggcaaagaaaugaaauucgaaguucucacccucgccucacuaaccacggaaauccaaauaaacauugaaaucgaaagcagaaaauccuacaaaaagaugcuaaaagaaaugggcgagguagccccagaauaccgccacgacagccccgacugcggaaugaucauccucugcauugcagcccucgucaucaccaaacuagccgccggcgacagaagcggccuaaccgcaguaauccgccgagccaacaacguacucaaaaacgaaaugaaacgcuacaaaggccuccuccccaaagacaucgccaacagcuucuacgaaguauucgaaaaauacccgcacuucaucgacgucuucguacacuucggcauagcccaaagcagcacacgaggcggcucccgcgucgaaggaauauucgccggccuguucaugaacgcauacggagcgggccaagucaugcuccgcugggguguacuagccaaguccgucaaaaacaucaugcuagggcacgcaagcguacaagccgaaauggaacaaguagucgaagucuacgaauacgcacaaaaacuaggcggcgaagccggcuucuaccacauccuaaacaaccccaaagccucauuacucucccucacccaauuuccucacuucuccagcgucguccucggaaacgccgccggccuaggcauaaugggggaauaccgcggcaccccgcgcaaccaagaccucuacgacgcagcaaaagccuacgcagaacaacuaaaagaaaacggagucaucaacuacagcguacuggaccuaaccgccgaagaacucgaagccauaaaacaccaacucaaccccaaagacaacgacgucgagcucuaaggacuaguguccaccugucccuccugggcugcuggauugucucguuuuccugccaaauaaacaggaucagcgcuuuacagaucuaaaaaaaaaaaaaaaaaaaaaaaaaaaaaaaaaaaaaaaaaaaaaaaaaaaaaaaaaaaaaaaaugcaucccccccccccccccccccccccccccccccaaaggcucuuuucagagccaccagaauu

SEQ ID NO: 20406 - RNA, 1511 nt, Artificial Sequence
  mRNA product Design e-4 comprising derived and/or modified sequence from HRSV(Memphis-37)__AIY60635.1__N (wt)
gggagacuccugucgggcggaaguaggaggaguagaguuuaaaaacaguacucuuuuuccgguucgggacguaguugaagcaacgacaagccggauaaccgcucuugagacaggaagcuuaccauggcucuuagcaaagucaaguugaacgauacacucaacaaagaucaacuucugucauccagcaaauacaccauccaacggagcacaggagauaguauugauacuccuaauuaugaugugcagaaacacaucaacaaguuauguggcauguuauuaaucacagaagaugcuaaucauaaauucacugggguaauagguauguuauaugcuaugucuagauuaggaagagaagacaccauaaaaauacucagagaugcgggauaucauguaaaagcaaauggaguggauguaacaacacaucgucaagacauuaauggaaaagaaaugaaauuugaaguguuaacauuggcaagcuuaacaacugaaauucaaaucaacauugagauagaaucuaggaaauccuacaaaaaaaugcuaaaagaaaugggagagguggcuccagaauacaggcaugacucuccugauuguggaaugauaauauuauguauagcagcauuaguaauaaccaaauuagcagcaggggauagaucuggucuuacugcugugauuaggagagcuaauaauguucuaaaaaaugaaaugaaacguuauaaaggcuuacuaccaaaggauauagccaacagcuucuaugaaguguuugaaaaauauccucacuuuauagauguuuuuguucauuuugguauagcacaaucuucuaccagagguggcaguagaguugaagggauuuuugcaggauuguuuaugaaugccuauggugcagggcaagugauguuacgguggggagucuuagcaaaaucaguuaaaaauauuaugcuaggacaugcuagugugcaagcagaaauggaacaaguuguggaaguuuaugaauaugcccaaaaauuggguggagaagcaggauucuaccauauauugaacaauccaaaagcaucauuauuaucuuugacucaauuuccccacuucuccaguguaguauugggcaaugcugcuggccuaggcauaaugggagaauacagagguacaccaaggaaucaagaucuauaugaugcugcaaaggcauaugcugaacaacucaaagaaaauggugugauuaacuacaguguauuagacuugacagcagaagaacuagaggcuaucaaacaucagcuuaauccaaaagauaaugauguagagcuuugaggacuaguguccaccugucccuccugggcugcuggauugucucguuuuccugccaaauaaacaggaucagcgcuuuacagaucuaaaaaaaaaaaaaaaaaaaaaaaaaaaaaaaaaaaaaaaaaaaaaaaaaaaaaaaaaaaaaaaaugcaucccccccccccccccccccccccccccccccaaaggcucuuuucagagccaccagaauu

SEQ ID NO: 20407 - RNA, 1511 nt, Artificial Sequence
  mRNA product Design e-4 comprising derived and/or modified sequence from HRSV(Memphis-37)__AIY60635.1__N (opt1)
gggagacuccugucgggcggaaguaggaggaguagaguuuaaaaacaguacucuuuuuccgguucgggacguaguugaagcaacgacaagccggauaaccgcucuugagacaggaagcuuaccauggcccugagcaaggugaagcucaacgacacccugaacaaggaccagcugcucuccagcuccaaguacaccauccagcgcagcaccggcgacuccaucgacacccccaacuacgacguccagaagcacaucaacaagcugugcgggaugcugcucaucaccgaggacgccaaccacaaguucaccggcgugaucgggaugcuguacgcgaugagccggcugggccgcgaggacacgaucaagauccuccgggacgccggguaccacgugaaggccaacggcgucgacgugaccacccaccgccaggacaucaacggcaaggagaugaaguucgaggugcugacccuggccucccucacgaccgagauccagaucaacaucgagaucgagagccggaaguccuacaagaagaugcugaaggagaugggggaggucgccccggaguaccgccacgacagccccgacugcggcaugaucauccugugcaucgcggcccucgugaucaccaagcuggccgccggggaccgguccggccugaccgcggugauccgccgggccaacaacguccucaagaacgagaugaagcgcuacaaggggcugcugcccaaggacaucgccaacagcuucuacgagguguucgagaaguacccccacuucaucgacguguucguccacuucggcaucgcccaguccagcacgcggggcgggucccgcguggagggcaucuucgccgggcuguucaugaacgcguacggcgccggccaggugaugcugcgguggggcguccuggccaagagcgugaagaacaucaugcucgggcacgccuccgugcaggccgagauggagcaggucguggagguguacgaguacgcgcagaagcucgggggcgaggccggguucuaccacauccugaacaacccgaaggccagccuccugucccugacccaguucccccacuucagcagcgucgugcucggcaacgccgccggccuggggaucaugggcgaguaccgcgggacgccccggaaccaggaccuguacgacgcggccaaggccuacgccgagcagcucaaggagaacggcgugaucaacuacuccguccuggaccugaccgccgaggagcucgaggcgaucaagcaccagcugaaccccaaggacaacgacguggagcugugaggacuaguguccaccugucccuccugggcugcuggauugucucguuuuccugccaaauaaacaggaucagcgcuuuacagaucuaaaaaaaaaaaaaaaaaaaaaaaaaaaaaaaaaaaaaaaaaaaaaaaaaaaaaaaaaaaaaaaaugcaucccccccccccccccccccccccccccccccaaaggcucuuuucagagccaccagaauu

SEQ ID NO: 20408 - RNA, 1511 nt, Artificial Sequence
  mRNA product Design e-4 comprising derived and/or modified sequence from HRSV(Memphis-37)__AIY60635.1__N (opt2)
gggagacuccugucgggcggaaguaggaggaguagaguuuaaaaacaguacucuuuuuccgguucgggacguaguugaagcaacgacaagccggauaaccgcucuugagacaggaagcuuaccauggcccucuccaaggucaagcucaacgacacccucaacaaggaccagcuccucuccuccuccaaguacaccauccagcgcuccaccggcgacuccaucgacacccccaacuacgacguccagaagcacaucaacaagcucugcggcaugcuccucaucaccgaggacgccaaccacaaguucaccggcgucaucggcaugcucuacgccaugucccgccucggccgcgaggacaccaucaagauccuccgcgacgccggcuaccacgucaaggccaacggcgucgacgucaccacccaccgccaggacaucaacggcaaggagaugaaguucgagguccucacccucgccucccucaccaccgagauccagaucaacaucgagaucgagucccgcaaguccuacaagaagaugcucaaggagaugggcgaggucgcccccgaguaccgccacgacucccccgacugcggcaugaucauccucugcaucgccgcccucgucaucaccaagcucgccgccggcgaccgcuccggccucaccgccgucauccgccgcgccaacaacguccucaagaacgagaugaagcgcuacaagggccuccuccccaaggacaucgccaacuccuucuacgaggucuucgagaaguacccccacuucaucgacgucuucguccacuucggcaucgcccaguccuccacccgcggcggcucccgcgucgagggcaucuucgccggccucuucaugaacgccuacggcgccggccaggucaugcuccgcuggggcguccucgccaaguccgucaagaacaucaugcucggccacgccuccguccaggccgagauggagcaggucgucgaggucuacgaguacgcccagaagcucggcggcgaggccggcuucuaccacauccucaacaaccccaaggccucccuccucucccucacccaguucccccacuucuccuccgucguccucggcaacgccgccggccucggcaucaugggcgaguaccgcggcaccccccgcaaccaggaccucuacgacgccgccaaggccuacgccgagcagcucaaggagaacggcgucaucaacuacuccguccucgaccucaccgccgaggagcucgaggccaucaagcaccagcucaaccccaaggacaacgacgucgagcucugaggacuaguguccaccugucccuccugggcugcuggauugucucguuuuccugccaaauaaacaggaucagcgcuuuacagaucuaaaaaaaaaaaaaaaaaaaaaaaaaaaaaaaaaaaaaaaaaaaaaaaaaaaaaaaaaaaaaaaaugcaucccccccccccccccccccccccccccccccaaaggcucuuuucagagccaccagaauu

SEQ ID NO: 20409 - RNA, 1511 nt, Artificial Sequence
  mRNA product Design e-4 comprising derived and/or modified sequence from HRSV(Memphis-37)__AIY60635.1__N (opt3)
gggagacuccugucgggcggaaguaggaggaguagaguuuaaaaacaguacucuuuuuccgguucgggacguaguugaagcaacgacaagccggauaaccgcucuugagacaggaagcuuaccauggcccugagcaaggugaaacucaacgacacccuuaauaaggaucagcuguuguccucuucaaaauacacaauccaaagaaguacuggcgacagcauugauacgcccaacuaugacguccagaagcacauaaauaaauuaugcgggaugcugcuaaucaccgaggaugcuaaccauaaguucacaggaguuauugguaugcucuacgcaauguccaggcugggccgggaagacacuaucaagauucuucgcgaugccggguaucacgugaaagcgaauggaguagacgugaccacacaucgacaggauaucaacggcaaggagaugaaauuugaaguccugaccuuggcuucucucacuacagagauacagaucaauauugaaaucgagucgcguaagucauacaaaaagaugcugaaggagaugggugaaguggccccugaguauagacacgacagcccagauugugggaugauuauccugugcauagcagcccucguuauuaccaaauuagcugcaggagacaggaguggccugacggccgugauccggcgcgcuaacaauguccuuaagaacgaaaugaaaagauacaagggcuugcugccgaaagauauugccaauuccuucuaugagguguuugagaaguacccccauuucaucgacguauuuguucacuucgggaucgcgcaaucuagcacuaggggagguucccggguggaaggcauuuuugcagggcuauucaugaacgccuacggagcuggccaggucaugcuccgcuggggugugcuggccaaaucagugaagaauauaaugcuugggcacgcaaguguccaggcugagauggaacagguuguggagguauaugaauacgcccaaaagcugggaggcgaggcgggcuuuuaucauaucuugaacaauccuaaagccagccuccugucuuuaacccaguucccacacuuuuccucagugguccuggggaacgcagcuggacucgguauuaugggcgaguaccgagggacacccagaaaccaggaccuuuaugaugccgcuaaggccuacgcagaacagcugaaagagaauggagugaucaacuauagcguuuuggaccuaacugccgaggaacuggaagcuauaaagcaucaacucaauccuaaagauaacgacguggagcugugaggacuaguguccaccugucccuccugggcugcuggauugucucguuuuccugccaaauaaacaggaucagcgcuuuacagaucuaaaaaaaaaaaaaaaaaaaaaaaaaaaaaaaaaaaaaaaaaaaaaaaaaaaaaaaaaaaaaaaaugcaucccccccccccccccccccccccccccccccaaaggcucuuuucagagccaccagaauu

SEQ ID NO: 20410 - RNA, 1511 nt, Artificial Sequence
  mRNA product Design e-4 comprising derived and/or modified sequence from HRSV(Memphis-37)__AIY60635.1__N (opt4)
gggagacuccugucgggcggaaguaggaggaguagaguuuaaaaacaguacucuuuuuccgguucgggacguaguugaagcaacgacaagccggauaaccgcucuugagacaggaagcuuaccauggcccugagcaaggugaagcugaacgacacccugaacaaggaccagcugcugagcagcagcaaguacaccauccagagaagcaccggcgacagcaucgacacccccaacuacgacgugcagaagcacaucaacaagcugugcggcaugcugcugaucaccgaggacgccaaccacaaguucaccggcgugaucggcaugcuguacgccaugagcagacugggcagagaggacaccaucaagauccugagagacgccggcuaccacgugaaggccaacggcguggacgugaccacccacagacaggacaucaacggcaaggagaugaaguucgaggugcugacccuggccagccugaccaccgagauccagaucaacaucgagaucgagagcagaaagagcuacaagaagaugcugaaggagaugggcgagguggcccccgaguacagacacgacagccccgacugcggcaugaucauccugugcaucgccgcccuggugaucaccaagcuggccgccggcgacagaagcggccugaccgccgugaucagaagagccaacaacgugcugaagaacgagaugaagagauacaagggccugcugcccaaggacaucgccaacagcuucuacgagguguucgagaaguacccccacuucaucgacguguucgugcacuucggcaucgcccagagcagcaccagaggcggcagcagaguggagggcaucuucgccggccuguucaugaacgccuacggcgccggccaggugaugcugagauggggcgugcuggccaagagcgugaagaacaucaugcugggccacgccagcgugcaggccgagauggagcaggugguggagguguacgaguacgcccagaagcugggcggcgaggccggcuucuaccacauccugaacaaccccaaggccagccugcugagccugacccaguucccccacuucagcagcguggugcugggcaacgccgccggccugggcaucaugggcgaguacagaggcacccccagaaaccaggaccuguacgacgccgccaaggccuacgccgagcagcugaaggagaacggcgugaucaacuacagcgugcuggaccugaccgccgaggagcuggaggccaucaagcaccagcugaaccccaaggacaacgacguggagcugugaggacuaguguccaccugucccuccugggcugcuggauugucucguuuuccugccaaauaaacaggaucagcgcuuuacagaucuaaaaaaaaaaaaaaaaaaaaaaaaaaaaaaaaaaaaaaaaaaaaaaaaaaaaaaaaaaaaaaaaugcaucccccccccccccccccccccccccccccccaaaggcucuuuucagagccaccagaauu

SEQ ID NO: 20411 - RNA, 1511 nt, Artificial Sequence
  mRNA product Design e-4 comprising derived and/or modified sequence from HRSV(Memphis-37)__AIY60635.1__N (opt5)
gggagacuccugucgggcggaaguaggaggaguagaguuuaaaaacaguacucuuuuuccgguucgggacguaguugaagcaacgacaagccggauaaccgcucuugagacaggaagcuuaccauggcccugagcaaggugaaacucaacgacacccugaauaaggaucagcuucuguccucuagcaaauacacaauccaaagauccacgggcgacucuauugauacccccaacuaugacguccagaagcacaucaauaaacucugcgggaugcugcuuauuacagaggaugcuaaccauaaguucaccggaguuaucggcaugcuguacgccaugagccggcucgggcgcgaagacacaauuaagauccugagagaugcgggauaucacgugaaagcuaauggcguggacgucaccacacaucggcaggauaucaacgggaaggagaugaaauuugaagugcugacccucgccucccugacgaccgagauucagaucaauauugaaaucgagucucgcaagagcuacaaaaagaugcuuaaggagaugggagaaguugccccugaguauagacacgacuccccggauuguggcaugauuauccugugcauugcugcccucgugaucacaaaacuggcugccggcgaccggagcgggcuuaccgcggucauccgcagagccaacaaugugcugaagaacgaaaugaaacgguacaagggacuccugcccaaagauauugcuaauucuuucuaugagguuuuugagaaguacccucauuucaucgacguguuuguccacuucggcauugcccaauccagcacacgcgggggaucuagaguggaaggcaucuuugcugggcuguucaugaacgccuacggagcgggccaggugaugcuccgguggggcguccuggccaaauccguuaagaauauuaugcuugggcacgcuagcgugcaggccgagauggaacagguggucgagguguaugaauacgcucaaaagcugggaggcgaggccggguuuuaucauauccucaacaaucccaaagccucucugcuuucccugacccaguucccucacuuuagcuccguugugcucggaaacgcugcgggccuggggaucaugggagaguaccgcggcacgcccagaaaccaggaccuguaugaugccgcuaaggccuacgccgaacagcucaaagagaauggcgucauuaacuauucugugcuggaccuuacagcugaggaacuggaagccaucaagcaucaacucaauccuaaagauaacgacguugagcugugaggacuaguguccaccugucccuccugggcugcuggauugucucguuuuccugccaaauaaacaggaucagcgcuuuacagaucuaaaaaaaaaaaaaaaaaaaaaaaaaaaaaaaaaaaaaaaaaaaaaaaaaaaaaaaaaaaaaaaaugcaucccccccccccccccccccccccccccccccaaaggcucuuuucagagccaccagaauu

SEQ ID NO: 20412 - RNA, 1511 nt, Artificial Sequence
  mRNA product Design e-4 comprising derived and/or modified sequence from HRSV(Memphis-37)__AIY60635.1__N (opt6)
gggagacuccugucgggcggaaguaggaggaguagaguuuaaaaacaguacucuuuuuccgguucgggacguaguugaagcaacgacaagccggauaaccgcucuugagacaggaagcuuaccauggccuuaaguaaaguaaaauuaaacgacacacuaaacaaagaccaauuacucucaucaucgaaauauacaauacaaagauccacaggagacuccauagauacaccaaauuacgacguacaaaaacauauaaacaaacucugcggaauguuauuaauaacagaagacgcaaaccacaaauucacaggagucauagguaugcuauacgcaaugucaagauuaggaagagaagauacaauaaaaauacuaagagacgcaggauaccacguaaaagcaaacggaguagacguaacaacacauagacaagauauaaacgguaaagaaaugaaauucgaaguacuaacacuagccagucuaacaacagaaauacaaauaaacauagaaauagaaagccgaaaaucauacaaaaaaauguuaaaagaaaugggggaaguagcacccgaauacagacaugauucaccugacugcggaaugauaauacucugcauagcggcauuagucauaacaaaacuagccgcaggagacagaagcggauuaacagcaguaauaagaagagcaaauaauguauuaaaaaaugaaaugaaaagguauaaaggauuacuaccaaaagauauagcaaacucauucuaugaaguuuucgaaaaauacccacacuucauagacgucuucguacacuuuggaauagcacaaagcagcacaagaggaggaagcagaguagaaggaauauucgcaggacuauucaugaaugcauacggagccggacaaguaaugcuaagauggggaguuuuagcaaaaagcguaaaaaacauaauguuaggacacgccuccguccaagccgaaauggaacaaguaguagaaguauacgaauaugcacaaaaacuaggaggagaagcaggauucuaucacauacucaauaacccaaaagcaucacuauugagcuuaacacaauucccacauuuuucauccguaguccuaggaaaugcagcaggcuuaggaauaaugggagaauacagaggcacaccaagaaaucaagacuuauacgaugcagcaaaagcauacgcagaacaacuaaaagaaaacggaguaauaaacuacucaguauuagauuuaacagcagaagaauuagaagcaauaaaacaucaacuaaauccuaaggauaaugauguagaacucuaaggacuaguguccaccugucccuccugggcugcuggauugucucguuuuccugccaaauaaacaggaucagcgcuuuacagaucuaaaaaaaaaaaaaaaaaaaaaaaaaaaaaaaaaaaaaaaaaaaaaaaaaaaaaaaaaaaaaaaaugcaucccccccccccccccccccccccccccccccaaaggcucuuuucagagccaccagaauu

SEQ ID NO: 20413 - RNA, 1511 nt, Artificial Sequence
  mRNA product Design e-4 comprising derived and/or modified sequence from HRSV(Memphis-37)__AIY60635.1__N (opt11)
gggagacuccugucgggcggaaguaggaggaguagaguuuaaaaacaguacucuuuuuccgguucgggacguaguugaagcaacgacaagccggauaaccgcucuugagacaggaagcuuaccauggcccuaagcaaagucaaacucaacgacacacuaaacaaagaccaacuccucagcuccagcaaauacaccauccaacgauccaccggcgacuccauagacacccccaacuacgacguccaaaaacacaucaacaaacuaugcggcaugcuccuaaucacagaagacgccaaccacaaauucaccggagucaucggcaugcucuacgccaugagccgccucggccgagaagacacaaucaaaauacuaagagacgccggcuaccacguaaaagccaacggcguagacguaaccacccaccgccaagacaucaacggcaaagaaaugaaauucgaaguucucacccucgccucacuaaccacggaaauccaaauaaacauugaaaucgaaagcagaaaauccuacaaaaagaugcuaaaagaaaugggcgagguagccccagaauaccgccacgacagccccgacugcggaaugaucauccucugcauugcagcccucgucaucaccaaacuagccgccggcgacagaagcggccuaaccgcaguaauccgccgagccaacaacguacucaaaaacgaaaugaaacgcuacaaaggccuccuccccaaagacaucgccaacagcuucuacgaaguauucgaaaaauacccgcacuucaucgacgucuucguacacuucggcauagcccaaagcagcacacgaggcggcucccgcgucgaaggaauauucgccggccuguucaugaacgcauacggagcgggccaagucaugcuccgcugggguguacuagccaaguccgucaaaaacaucaugcuagggcacgcaagcguacaagccgaaauggaacaaguagucgaagucuacgaauacgcacaaaaacuaggcggcgaagccggcuucuaccacauccuaaacaaccccaaagccucauuacucucccucacccaauuuccucacuucuccagcgucguccucggaaacgccgccggccuaggcauaaugggggaauaccgcggcaccccgcgcaaccaagaccucuacgacgcagcaaaagccuacgcagaacaacuaaaagaaaacggagucaucaacuacagcguacuggaccuaaccgccgaagaacucgaagccauaaaacaccaacucaaccccaaagacaacgacgucgagcucuaaggacuaguguccaccugucccuccugggcugcuggauugucucguuuuccugccaaauaaacaggaucagcgcuuuacagaucuaaaaaaaaaaaaaaaaaaaaaaaaaaaaaaaaaaaaaaaaaaaaaaaaaaaaaaaaaaaaaaaaugcaucccccccccccccccccccccccccccccccaaaggcucuuuucagagccaccagaauu

SEQ ID NO: 20414 - RNA, 1478 nt, Artificial Sequence
  mRNA product Design e-5 comprising derived and/or modified sequence from HRSV(Memphis-37)__AIY60635.1__N (wt)
gggagagcggcucggccauuuugucccagucaguccggaggcugcggcugcagaaguaccgccugcggaguaacugcaaagaagcuuaccauggcucuuagcaaagucaaguugaacgauacacucaacaaagaucaacuucugucauccagcaaauacaccauccaacggagcacaggagauaguauugauacuccuaauuaugaugugcagaaacacaucaacaaguuauguggcauguuauuaaucacagaagaugcuaaucauaaauucacugggguaauagguauguuauaugcuaugucuagauuaggaagagaagacaccauaaaaauacucagagaugcgggauaucauguaaaagcaaauggaguggauguaacaacacaucgucaagacauuaauggaaaagaaaugaaauuugaaguguuaacauuggcaagcuuaacaacugaaauucaaaucaacauugagauagaaucuaggaaauccuacaaaaaaaugcuaaaagaaaugggagagguggcuccagaauacaggcaugacucuccugauuguggaaugauaauauuauguauagcagcauuaguaauaaccaaauuagcagcaggggauagaucuggucuuacugcugugauuaggagagcuaauaauguucuaaaaaaugaaaugaaacguuauaaaggcuuacuaccaaaggauauagccaacagcuucuaugaaguguuugaaaaauauccucacuuuauagauguuuuuguucauuuugguauagcacaaucuucuaccagagguggcaguagaguugaagggauuuuugcaggauuguuuaugaaugccuauggugcagggcaagugauguuacgguggggagucuuagcaaaaucaguuaaaaauauuaugcuaggacaugcuagugugcaagcagaaauggaacaaguuguggaaguuuaugaauaugcccaaaaauuggguggagaagcaggauucuaccauauauugaacaauccaaaagcaucauuauuaucuuugacucaauuuccccacuucuccaguguaguauugggcaaugcugcuggccuaggcauaaugggagaauacagagguacaccaaggaaucaagaucuauaugaugcugcaaaggcauaugcugaacaacucaaagaaaauggugugauuaacuacaguguauuagacuugacagcagaagaacuagaggcuaucaaacaucagcuuaauccaaaagauaaugauguagagcuuugaggacuaguguccaccugucccuccugggcugcuggauugucucguuuuccugccaaauaaacaggaucagcgcuuuacagaucuaaaaaaaaaaaaaaaaaaaaaaaaaaaaaaaaaaaaaaaaaaaaaaaaaaaaaaaaaaaaaaaaugcaucccccccccccccccccccccccccccccccaaaggcucuuuucagagccaccagaauu

SEQ ID NO: 20415 - RNA, 1478 nt, Artificial Sequence
  mRNA product Design e-5 comprising derived and/or modified sequence from HRSV(Memphis-37)__AIY60635.1__N (opt1)
gggagagcggcucggccauuuugucccagucaguccggaggcugcggcugcagaaguaccgccugcggaguaacugcaaagaagcuuaccauggcccugagcaaggugaagcucaacgacacccugaacaaggaccagcugcucuccagcuccaaguacaccauccagcgcagcaccggcgacuccaucgacacccccaacuacgacguccagaagcacaucaacaagcugugcgggaugcugcucaucaccgaggacgccaaccacaaguucaccggcgugaucgggaugcuguacgcgaugagccggcugggccgcgaggacacgaucaagauccuccgggacgccggguaccacgugaaggccaacggcgucgacgugaccacccaccgccaggacaucaacggcaaggagaugaaguucgaggugcugacccuggccucccucacgaccgagauccagaucaacaucgagaucgagagccggaaguccuacaagaagaugcugaaggagaugggggaggucgccccggaguaccgccacgacagccccgacugcggcaugaucauccugugcaucgcggcccucgugaucaccaagcuggccgccggggaccgguccggccugaccgcggugauccgccgggccaacaacguccucaagaacgagaugaagcgcuacaaggggcugcugcccaaggacaucgccaacagcuucuacgagguguucgagaaguacccccacuucaucgacguguucguccacuucggcaucgcccaguccagcacgcggggcgggucccgcguggagggcaucuucgccgggcuguucaugaacgcguacggcgccggccaggugaugcugcgguggggcguccuggccaagagcgugaagaacaucaugcucgggcacgccuccgugcaggccgagauggagcaggucguggagguguacgaguacgcgcagaagcucgggggcgaggccggguucuaccacauccugaacaacccgaaggccagccuccugucccugacccaguucccccacuucagcagcgucgugcucggcaacgccgccggccuggggaucaugggcgaguaccgcgggacgccccggaaccaggaccuguacgacgcggccaaggccuacgccgagcagcucaaggagaacggcgugaucaacuacuccguccuggaccugaccgccgaggagcucgaggcgaucaagcaccagcugaaccccaaggacaacgacguggagcugugaggacuaguguccaccugucccuccugggcugcuggauugucucguuuuccugccaaauaaacaggaucagcgcuuuacagaucuaaaaaaaaaaaaaaaaaaaaaaaaaaaaaaaaaaaaaaaaaaaaaaaaaaaaaaaaaaaaaaaaugcaucccccccccccccccccccccccccccccccaaaggcucuuuucagagccaccagaauu

SEQ ID NO: 20416 - RNA, 1478 nt, Artificial Sequence
  mRNA product Design e-5 comprising derived and/or modified sequence from HRSV(Memphis-37)__AIY60635.1__N (opt2)
gggagagcggcucggccauuuugucccagucaguccggaggcugcggcugcagaaguaccgccugcggaguaacugcaaagaagcuuaccauggcccucuccaaggucaagcucaacgacacccucaacaaggaccagcuccucuccuccuccaaguacaccauccagcgcuccaccggcgacuccaucgacacccccaacuacgacguccagaagcacaucaacaagcucugcggcaugcuccucaucaccgaggacgccaaccacaaguucaccggcgucaucggcaugcucuacgccaugucccgccucggccgcgaggacaccaucaagauccuccgcgacgccggcuaccacgucaaggccaacggcgucgacgucaccacccaccgccaggacaucaacggcaaggagaugaaguucgagguccucacccucgccucccucaccaccgagauccagaucaacaucgagaucgagucccgcaaguccuacaagaagaugcucaaggagaugggcgaggucgcccccgaguaccgccacgacucccccgacugcggcaugaucauccucugcaucgccgcccucgucaucaccaagcucgccgccggcgaccgcuccggccucaccgccgucauccgccgcgccaacaacguccucaagaacgagaugaagcgcuacaagggccuccuccccaaggacaucgccaacuccuucuacgaggucuucgagaaguacccccacuucaucgacgucuucguccacuucggcaucgcccaguccuccacccgcggcggcucccgcgucgagggcaucuucgccggccucuucaugaacgccuacggcgccggccaggucaugcuccgcuggggcguccucgccaaguccgucaagaacaucaugcucggccacgccuccguccaggccgagauggagcaggucgucgaggucuacgaguacgcccagaagcucggcggcgaggccggcuucuaccacauccucaacaaccccaaggccucccuccucucccucacccaguucccccacuucuccuccgucguccucggcaacgccgccggccucggcaucaugggcgaguaccgcggcaccccccgcaaccaggaccucuacgacgccgccaaggccuacgccgagcagcucaaggagaacggcgucaucaacuacuccguccucgaccucaccgccgaggagcucgaggccaucaagcaccagcucaaccccaaggacaacgacgucgagcucugaggacuaguguccaccugucccuccugggcugcuggauugucucguuuuccugccaaauaaacaggaucagcgcuuuacagaucuaaaaaaaaaaaaaaaaaaaaaaaaaaaaaaaaaaaaaaaaaaaaaaaaaaaaaaaaaaaaaaaaugcaucccccccccccccccccccccccccccccccaaaggcucuuuucagagccaccagaauu

SEQ ID NO: 20417 - RNA, 1478 nt, Artificial Sequence
  mRNA product Design e-5 comprising derived and/or modified sequence from HRSV(Memphis-37)__AIY60635.1__N (opt3)
gggagagcggcucggccauuuugucccagucaguccggaggcugcggcugcagaaguaccgccugcggaguaacugcaaagaagcuuaccauggcccugagcaaggugaaacucaacgacacccuuaauaaggaucagcuguuguccucuucaaaauacacaauccaaagaaguacuggcgacagcauugauacgcccaacuaugacguccagaagcacauaaauaaauuaugcgggaugcugcuaaucaccgaggaugcuaaccauaaguucacaggaguuauugguaugcucuacgcaauguccaggcugggccgggaagacacuaucaagauucuucgcgaugccggguaucacgugaaagcgaauggaguagacgugaccacacaucgacaggauaucaacggcaaggagaugaaauuugaaguccugaccuuggcuucucucacuacagagauacagaucaauauugaaaucgagucgcguaagucauacaaaaagaugcugaaggagaugggugaaguggccccugaguauagacacgacagcccagauugugggaugauuauccugugcauagcagcccucguuauuaccaaauuagcugcaggagacaggaguggccugacggccgugauccggcgcgcuaacaauguccuuaagaacgaaaugaaaagauacaagggcuugcugccgaaagauauugccaauuccuucuaugagguguuugagaaguacccccauuucaucgacguauuuguucacuucgggaucgcgcaaucuagcacuaggggagguucccggguggaaggcauuuuugcagggcuauucaugaacgccuacggagcuggccaggucaugcuccgcuggggugugcuggccaaaucagugaagaauauaaugcuugggcacgcaaguguccaggcugagauggaacagguuguggagguauaugaauacgcccaaaagcugggaggcgaggcgggcuuuuaucauaucuugaacaauccuaaagccagccuccugucuuuaacccaguucccacacuuuuccucagugguccuggggaacgcagcuggacucgguauuaugggcgaguaccgagggacacccagaaaccaggaccuuuaugaugccgcuaaggccuacgcagaacagcugaaagagaauggagugaucaacuauagcguuuuggaccuaacugccgaggaacuggaagcuauaaagcaucaacucaauccuaaagauaacgacguggagcugugaggacuaguguccaccugucccuccugggcugcuggauugucucguuuuccugccaaauaaacaggaucagcgcuuuacagaucuaaaaaaaaaaaaaaaaaaaaaaaaaaaaaaaaaaaaaaaaaaaaaaaaaaaaaaaaaaaaaaaaugcaucccccccccccccccccccccccccccccccaaaggcucuuuucagagccaccagaauu

SEQ ID NO: 20418 - RNA, 1478 nt, Artificial Sequence
  mRNA product Design e-5 comprising derived and/or modified sequence from HRSV(Memphis-37)__AIY60635.1__N (opt4)
gggagagcggcucggccauuuugucccagucaguccggaggcugcggcugcagaaguaccgccugcggaguaacugcaaagaagcuuaccauggcccugagcaaggugaagcugaacgacacccugaacaaggaccagcugcugagcagcagcaaguacaccauccagagaagcaccggcgacagcaucgacacccccaacuacgacgugcagaagcacaucaacaagcugugcggcaugcugcugaucaccgaggacgccaaccacaaguucaccggcgugaucggcaugcuguacgccaugagcagacugggcagagaggacaccaucaagauccugagagacgccggcuaccacgugaaggccaacggcguggacgugaccacccacagacaggacaucaacggcaaggagaugaaguucgaggugcugacccuggccagccugaccaccgagauccagaucaacaucgagaucgagagcagaaagagcuacaagaagaugcugaaggagaugggcgagguggcccccgaguacagacacgacagccccgacugcggcaugaucauccugugcaucgccgcccuggugaucaccaagcuggccgccggcgacagaagcggccugaccgccgugaucagaagagccaacaacgugcugaagaacgagaugaagagauacaagggccugcugcccaaggacaucgccaacagcuucuacgagguguucgagaaguacccccacuucaucgacguguucgugcacuucggcaucgcccagagcagcaccagaggcggcagcagaguggagggcaucuucgccggccuguucaugaacgccuacggcgccggccaggugaugcugagauggggcgugcuggccaagagcgugaagaacaucaugcugggccacgccagcgugcaggccgagauggagcaggugguggagguguacgaguacgcccagaagcugggcggcgaggccggcuucuaccacauccugaacaaccccaaggccagccugcugagccugacccaguucccccacuucagcagcguggugcugggcaacgccgccggccugggcaucaugggcgaguacagaggcacccccagaaaccaggaccuguacgacgccgccaaggccuacgccgagcagcugaaggagaacggcgugaucaacuacagcgugcuggaccugaccgccgaggagcuggaggccaucaagcaccagcugaaccccaaggacaacgacguggagcugugaggacuaguguccaccugucccuccugggcugcuggauugucucguuuuccugccaaauaaacaggaucagcgcuuuacagaucuaaaaaaaaaaaaaaaaaaaaaaaaaaaaaaaaaaaaaaaaaaaaaaaaaaaaaaaaaaaaaaaaugcaucccccccccccccccccccccccccccccccaaaggcucuuuucagagccaccagaauu

SEQ ID NO: 20419 - RNA, 1478 nt, Artificial Sequence
  mRNA product Design e-5 comprising derived and/or modified sequence from HRSV(Memphis-37)__AIY60635.1__N (opt5)
gggagagcggcucggccauuuugucccagucaguccggaggcugcggcugcagaaguaccgccugcggaguaacugcaaagaagcuuaccauggcccugagcaaggugaaacucaacgacacccugaauaaggaucagcuucuguccucuagcaaauacacaauccaaagauccacgggcgacucuauugauacccccaacuaugacguccagaagcacaucaauaaacucugcgggaugcugcuuauuacagaggaugcuaaccauaaguucaccggaguuaucggcaugcuguacgccaugagccggcucgggcgcgaagacacaauuaagauccugagagaugcgggauaucacgugaaagcuaauggcguggacgucaccacacaucggcaggauaucaacgggaaggagaugaaauuugaagugcugacccucgccucccugacgaccgagauucagaucaauauugaaaucgagucucgcaagagcuacaaaaagaugcuuaaggagaugggagaaguugccccugaguauagacacgacuccccggauuguggcaugauuauccugugcauugcugcccucgugaucacaaaacuggcugccggcgaccggagcgggcuuaccgcggucauccgcagagccaacaaugugcugaagaacgaaaugaaacgguacaagggacuccugcccaaagauauugcuaauucuuucuaugagguuuuugagaaguacccucauuucaucgacguguuuguccacuucggcauugcccaauccagcacacgcgggggaucuagaguggaaggcaucuuugcugggcuguucaugaacgccuacggagcgggccaggugaugcuccgguggggcguccuggccaaauccguuaagaauauuaugcuugggcacgcuagcgugcaggccgagauggaacagguggucgagguguaugaauacgcucaaaagcugggaggcgaggccggguuuuaucauauccucaacaaucccaaagccucucugcuuucccugacccaguucccucacuuuagcuccguugugcucggaaacgcugcgggccuggggaucaugggagaguaccgcggcacgcccagaaaccaggaccuguaugaugccgcuaaggccuacgccgaacagcucaaagagaauggcgucauuaacuauucugugcuggaccuuacagcugaggaacuggaagccaucaagcaucaacucaauccuaaagauaacgacguugagcugugaggacuaguguccaccugucccuccugggcugcuggauugucucguuuuccugccaaauaaacaggaucagcgcuuuacagaucuaaaaaaaaaaaaaaaaaaaaaaaaaaaaaaaaaaaaaaaaaaaaaaaaaaaaaaaaaaaaaaaaugcaucccccccccccccccccccccccccccccccaaaggcucuuuucagagccaccagaauu

SEQ ID NO: 20420 - RNA, 1478 nt, Artificial Sequence
  mRNA product Design e-5 comprising derived and/or modified sequence from HRSV(Memphis-37)__AIY60635.1__N (opt6)
gggagagcggcucggccauuuugucccagucaguccggaggcugcggcugcagaaguaccgccugcggaguaacugcaaagaagcuuaccauggccuuaaguaaaguaaaauuaaacgacacacuaaacaaagaccaauuacucucaucaucgaaauauacaauacaaagauccacaggagacuccauagauacaccaaauuacgacguacaaaaacauauaaacaaacucugcggaauguuauuaauaacagaagacgcaaaccacaaauucacaggagucauagguaugcuauacgcaaugucaagauuaggaagagaagauacaauaaaaauacuaagagacgcaggauaccacguaaaagcaaacggaguagacguaacaacacauagacaagauauaaacgguaaagaaaugaaauucgaaguacuaacacuagccagucuaacaacagaaauacaaauaaacauagaaauagaaagccgaaaaucauacaaaaaaauguuaaaagaaaugggggaaguagcacccgaauacagacaugauucaccugacugcggaaugauaauacucugcauagcggcauuagucauaacaaaacuagccgcaggagacagaagcggauuaacagcaguaauaagaagagcaaauaauguauuaaaaaaugaaaugaaaagguauaaaggauuacuaccaaaagauauagcaaacucauucuaugaaguuuucgaaaaauacccacacuucauagacgucuucguacacuuuggaauagcacaaagcagcacaagaggaggaagcagaguagaaggaauauucgcaggacuauucaugaaugcauacggagccggacaaguaaugcuaagauggggaguuuuagcaaaaagcguaaaaaacauaauguuaggacacgccuccguccaagccgaaauggaacaaguaguagaaguauacgaauaugcacaaaaacuaggaggagaagcaggauucuaucacauacucaauaacccaaaagcaucacuauugagcuuaacacaauucccacauuuuucauccguaguccuaggaaaugcagcaggcuuaggaauaaugggagaauacagaggcacaccaagaaaucaagacuuauacgaugcagcaaaagcauacgcagaacaacuaaaagaaaacggaguaauaaacuacucaguauuagauuuaacagcagaagaauuagaagcaauaaaacaucaacuaaauccuaaggauaaugauguagaacucuaaggacuaguguccaccugucccuccugggcugcuggauugucucguuuuccugccaaauaaacaggaucagcgcuuuacagaucuaaaaaaaaaaaaaaaaaaaaaaaaaaaaaaaaaaaaaaaaaaaaaaaaaaaaaaaaaaaaaaaaugcaucccccccccccccccccccccccccccccccaaaggcucuuuucagagccaccagaauu

SEQ ID NO: 20421 - RNA, 1478 nt, Artificial Sequence
  mRNA product Design e-5 comprising derived and/or modified sequence from HRSV(Memphis-37)__AIY60635.1__N (opt11)
gggagagcggcucggccauuuugucccagucaguccggaggcugcggcugcagaaguaccgccugcggaguaacugcaaagaagcuuaccauggcccuaagcaaagucaaacucaacgacacacuaaacaaagaccaacuccucagcuccagcaaauacaccauccaacgauccaccggcgacuccauagacacccccaacuacgacguccaaaaacacaucaacaaacuaugcggcaugcuccuaaucacagaagacgccaaccacaaauucaccggagucaucggcaugcucuacgccaugagccgccucggccgagaagacacaaucaaaauacuaagagacgccggcuaccacguaaaagccaacggcguagacguaaccacccaccgccaagacaucaacggcaaagaaaugaaauucgaaguucucacccucgccucacuaaccacggaaauccaaauaaacauugaaaucgaaagcagaaaauccuacaaaaagaugcuaaaagaaaugggcgagguagccccagaauaccgccacgacagccccgacugcggaaugaucauccucugcauugcagcccucgucaucaccaaacuagccgccggcgacagaagcggccuaaccgcaguaauccgccgagccaacaacguacucaaaaacgaaaugaaacgcuacaaaggccuccuccccaaagacaucgccaacagcuucuacgaaguauucgaaaaauacccgcacuucaucgacgucuucguacacuucggcauagcccaaagcagcacacgaggcggcucccgcgucgaaggaauauucgccggccuguucaugaacgcauacggagcgggccaagucaugcuccgcugggguguacuagccaaguccgucaaaaacaucaugcuagggcacgcaagcguacaagccgaaauggaacaaguagucgaagucuacgaauacgcacaaaaacuaggcggcgaagccggcuucuaccacauccuaaacaaccccaaagccucauuacucucccucacccaauuuccucacuucuccagcgucguccucggaaacgccgccggccuaggcauaaugggggaauaccgcggcaccccgcgcaaccaagaccucuacgacgcagcaaaagccuacgcagaacaacuaaaagaaaacggagucaucaacuacagcguacuggaccuaaccgccgaagaacucgaagccauaaaacaccaacucaaccccaaagacaacgacgucgagcucuaaggacuaguguccaccugucccuccugggcugcuggauugucucguuuuccugccaaauaaacaggaucagcgcuuuacagaucuaaaaaaaaaaaaaaaaaaaaaaaaaaaaaaaaaaaaaaaaaaaaaaaaaaaaaaaaaaaaaaaaugcaucccccccccccccccccccccccccccccccaaaggcucuuuucagagccaccagaauu

SEQ ID NO: 20422 - RNA, 1545 nt, Artificial Sequence
  mRNA product Design e-6 comprising derived and/or modified sequence from HRSV(Memphis-37)__AIY60635.1__N (wt)
gggagagcggcucggccauuuugucccagucaguccggaggcugcggcugcagaaguaccgccugcggaguaacugcaaagaagcuuaccauggcucuuagcaaagucaaguugaacgauacacucaacaaagaucaacuucugucauccagcaaauacaccauccaacggagcacaggagauaguauugauacuccuaauuaugaugugcagaaacacaucaacaaguuauguggcauguuauuaaucacagaagaugcuaaucauaaauucacugggguaauagguauguuauaugcuaugucuagauuaggaagagaagacaccauaaaaauacucagagaugcgggauaucauguaaaagcaaauggaguggauguaacaacacaucgucaagacauuaauggaaaagaaaugaaauuugaaguguuaacauuggcaagcuuaacaacugaaauucaaaucaacauugagauagaaucuaggaaauccuacaaaaaaaugcuaaaagaaaugggagagguggcuccagaauacaggcaugacucuccugauuguggaaugauaauauuauguauagcagcauuaguaauaaccaaauuagcagcaggggauagaucuggucuuacugcugugauuaggagagcuaauaauguucuaaaaaaugaaaugaaacguuauaaaggcuuacuaccaaaggauauagccaacagcuucuaugaaguguuugaaaaauauccucacuuuauagauguuuuuguucauuuugguauagcacaaucuucuaccagagguggcaguagaguugaagggauuuuugcaggauuguuuaugaaugccuauggugcagggcaagugauguuacgguggggagucuuagcaaaaucaguuaaaaauauuaugcuaggacaugcuagugugcaagcagaaauggaacaaguuguggaaguuuaugaauaugcccaaaaauuggguggagaagcaggauucuaccauauauugaacaauccaaaagcaucauuauuaucuuugacucaauuuccccacuucuccaguguaguauugggcaaugcugcuggccuaggcauaaugggagaauacagagguacaccaaggaaucaagaucuauaugaugcugcaaaggcauaugcugaacaacucaaagaaaauggugugauuaacuacaguguauuagacuugacagcagaagaacuagaggcuaucaaacaucagcuuaauccaaaagauaaugauguagagcuuugaggacuaguacuggcugcaucucccuuuccucuguccuccauccuucucccaggauggugaagggggaccugguacccagugauccccaccccaggauccuaaaucaugacuuaccugcuaauaaaaacucauuggaaaagugagaagaucuaaaaaaaaaaaaaaaaaaaaaaaaaaaaaaaaaaaaaaaaaaaaaaaaaaaaaaaaaaaaaaaaugcaucccccccccccccccccccccccccccccccaaaggcucuuuucagagccaccagaauu

SEQ ID NO: 20423 - RNA, 1545 nt, Artificial Sequence
  mRNA product Design e-6 comprising derived and/or modified sequence from HRSV(Memphis-37)__AIY60635.1__N (opt1)
gggagagcggcucggccauuuugucccagucaguccggaggcugcggcugcagaaguaccgccugcggaguaacugcaaagaagcuuaccauggcccugagcaaggugaagcucaacgacacccugaacaaggaccagcugcucuccagcuccaaguacaccauccagcgcagcaccggcgacuccaucgacacccccaacuacgacguccagaagcacaucaacaagcugugcgggaugcugcucaucaccgaggacgccaaccacaaguucaccggcgugaucgggaugcuguacgcgaugagccggcugggccgcgaggacacgaucaagauccuccgggacgccggguaccacgugaaggccaacggcgucgacgugaccacccaccgccaggacaucaacggcaaggagaugaaguucgaggugcugacccuggccucccucacgaccgagauccagaucaacaucgagaucgagagccggaaguccuacaagaagaugcugaaggagaugggggaggucgccccggaguaccgccacgacagccccgacugcggcaugaucauccugugcaucgcggcccucgugaucaccaagcuggccgccggggaccgguccggccugaccgcggugauccgccgggccaacaacguccucaagaacgagaugaagcgcuacaaggggcugcugcccaaggacaucgccaacagcuucuacgagguguucgagaaguacccccacuucaucgacguguucguccacuucggcaucgcccaguccagcacgcggggcgggucccgcguggagggcaucuucgccgggcuguucaugaacgcguacggcgccggccaggugaugcugcgguggggcguccuggccaagagcgugaagaacaucaugcucgggcacgccuccgugcaggccgagauggagcaggucguggagguguacgaguacgcgcagaagcucgggggcgaggccggguucuaccacauccugaacaacccgaaggccagccuccugucccugacccaguucccccacuucagcagcgucgugcucggcaacgccgccggccuggggaucaugggcgaguaccgcgggacgccccggaaccaggaccuguacgacgcggccaaggccuacgccgagcagcucaaggagaacggcgugaucaacuacuccguccuggaccugaccgccgaggagcucgaggcgaucaagcaccagcugaaccccaaggacaacgacguggagcugugaggacuaguacuggcugcaucucccuuuccucuguccuccauccuucucccaggauggugaagggggaccugguacccagugauccccaccccaggauccuaaaucaugacuuaccugcuaauaaaaacucauuggaaaagugagaagaucuaaaaaaaaaaaaaaaaaaaaaaaaaaaaaaaaaaaaaaaaaaaaaaaaaaaaaaaaaaaaaaaaugcaucccccccccccccccccccccccccccccccaaaggcucuuuucagagccaccagaauu

SEQ ID NO: 20424 - RNA, 1545 nt, Artificial Sequence
  mRNA product Design e-6 comprising derived and/or modified sequence from HRSV(Memphis-37)__AIY60635.1__N (opt2)
gggagagcggcucggccauuuugucccagucaguccggaggcugcggcugcagaaguaccgccugcggaguaacugcaaagaagcuuaccauggcccucuccaaggucaagcucaacgacacccucaacaaggaccagcuccucuccuccuccaaguacaccauccagcgcuccaccggcgacuccaucgacacccccaacuacgacguccagaagcacaucaacaagcucugcggcaugcuccucaucaccgaggacgccaaccacaaguucaccggcgucaucggcaugcucuacgccaugucccgccucggccgcgaggacaccaucaagauccuccgcgacgccggcuaccacgucaaggccaacggcgucgacgucaccacccaccgccaggacaucaacggcaaggagaugaaguucgagguccucacccucgccucccucaccaccgagauccagaucaacaucgagaucgagucccgcaaguccuacaagaagaugcucaaggagaugggcgaggucgcccccgaguaccgccacgacucccccgacugcggcaugaucauccucugcaucgccgcccucgucaucaccaagcucgccgccggcgaccgcuccggccucaccgccgucauccgccgcgccaacaacguccucaagaacgagaugaagcgcuacaagggccuccuccccaaggacaucgccaacuccuucuacgaggucuucgagaaguacccccacuucaucgacgucuucguccacuucggcaucgcccaguccuccacccgcggcggcucccgcgucgagggcaucuucgccggccucuucaugaacgccuacggcgccggccaggucaugcuccgcuggggcguccucgccaaguccgucaagaacaucaugcucggccacgccuccguccaggccgagauggagcaggucgucgaggucuacgaguacgcccagaagcucggcggcgaggccggcuucuaccacauccucaacaaccccaaggccucccuccucucccucacccaguucccccacuucuccuccgucguccucggcaacgccgccggccucggcaucaugggcgaguaccgcggcaccccccgcaaccaggaccucuacgacgccgccaaggccuacgccgagcagcucaaggagaacggcgucaucaacuacuccguccucgaccucaccgccgaggagcucgaggccaucaagcaccagcucaaccccaaggacaacgacgucgagcucugaggacuaguacuggcugcaucucccuuuccucuguccuccauccuucucccaggauggugaagggggaccugguacccagugauccccaccccaggauccuaaaucaugacuuaccugcuaauaaaaacucauuggaaaagugagaagaucuaaaaaaaaaaaaaaaaaaaaaaaaaaaaaaaaaaaaaaaaaaaaaaaaaaaaaaaaaaaaaaaaugcaucccccccccccccccccccccccccccccccaaaggcucuuuucagagccaccagaauu

SEQ ID NO: 20425 - RNA, 1545 nt, Artificial Sequence
  mRNA product Design e-6 comprising derived and/or modified sequence from HRSV(Memphis-37)__AIY60635.1__N (opt3)
gggagagcggcucggccauuuugucccagucaguccggaggcugcggcugcagaaguaccgccugcggaguaacugcaaagaagcuuaccauggcccugagcaaggugaaacucaacgacacccuuaauaaggaucagcuguuguccucuucaaaauacacaauccaaagaaguacuggcgacagcauugauacgcccaacuaugacguccagaagcacauaaauaaauuaugcgggaugcugcuaaucaccgaggaugcuaaccauaaguucacaggaguuauugguaugcucuacgcaauguccaggcugggccgggaagacacuaucaagauucuucgcgaugccggguaucacgugaaagcgaauggaguagacgugaccacacaucgacaggauaucaacggcaaggagaugaaauuugaaguccugaccuuggcuucucucacuacagagauacagaucaauauugaaaucgagucgcguaagucauacaaaaagaugcugaaggagaugggugaaguggccccugaguauagacacgacagcccagauugugggaugauuauccugugcauagcagcccucguuauuaccaaauuagcugcaggagacaggaguggccugacggccgugauccggcgcgcuaacaauguccuuaagaacgaaaugaaaagauacaagggcuugcugccgaaagauauugccaauuccuucuaugagguguuugagaaguacccccauuucaucgacguauuuguucacuucgggaucgcgcaaucuagcacuaggggagguucccggguggaaggcauuuuugcagggcuauucaugaacgccuacggagcuggccaggucaugcuccgcuggggugugcuggccaaaucagugaagaauauaaugcuugggcacgcaaguguccaggcugagauggaacagguuguggagguauaugaauacgcccaaaagcugggaggcgaggcgggcuuuuaucauaucuugaacaauccuaaagccagccuccugucuuuaacccaguucccacacuuuuccucagugguccuggggaacgcagcuggacucgguauuaugggcgaguaccgagggacacccagaaaccaggaccuuuaugaugccgcuaaggccuacgcagaacagcugaaagagaauggagugaucaacuauagcguuuuggaccuaacugccgaggaacuggaagcuauaaagcaucaacucaauccuaaagauaacgacguggagcugugaggacuaguacuggcugcaucucccuuuccucuguccuccauccuucucccaggauggugaagggggaccugguacccagugauccccaccccaggauccuaaaucaugacuuaccugcuaauaaaaacucauuggaaaagugagaagaucuaaaaaaaaaaaaaaaaaaaaaaaaaaaaaaaaaaaaaaaaaaaaaaaaaaaaaaaaaaaaaaaaugcaucccccccccccccccccccccccccccccccaaaggcucuuuucagagccaccagaauu

SEQ ID NO: 20426 - RNA, 1545 nt, Artificial Sequence
  mRNA product Design e-6 comprising derived and/or modified sequence from HRSV(Memphis-37)__AIY60635.1__N (opt4)
gggagagcggcucggccauuuugucccagucaguccggaggcugcggcugcagaaguaccgccugcggaguaacugcaaagaagcuuaccauggcccugagcaaggugaagcugaacgacacccugaacaaggaccagcugcugagcagcagcaaguacaccauccagagaagcaccggcgacagcaucgacacccccaacuacgacgugcagaagcacaucaacaagcugugcggcaugcugcugaucaccgaggacgccaaccacaaguucaccggcgugaucggcaugcuguacgccaugagcagacugggcagagaggacaccaucaagauccugagagacgccggcuaccacgugaaggccaacggcguggacgugaccacccacagacaggacaucaacggcaaggagaugaaguucgaggugcugacccuggccagccugaccaccgagauccagaucaacaucgagaucgagagcagaaagagcuacaagaagaugcugaaggagaugggcgagguggcccccgaguacagacacgacagccccgacugcggcaugaucauccugugcaucgccgcccuggugaucaccaagcuggccgccggcgacagaagcggccugaccgccgugaucagaagagccaacaacgugcugaagaacgagaugaagagauacaagggccugcugcccaaggacaucgccaacagcuucuacgagguguucgagaaguacccccacuucaucgacguguucgugcacuucggcaucgcccagagcagcaccagaggcggcagcagaguggagggcaucuucgccggccuguucaugaacgccuacggcgccggccaggugaugcugagauggggcgugcuggccaagagcgugaagaacaucaugcugggccacgccagcgugcaggccgagauggagcaggugguggagguguacgaguacgcccagaagcugggcggcgaggccggcuucuaccacauccugaacaaccccaaggccagccugcugagccugacccaguucccccacuucagcagcguggugcugggcaacgccgccggccugggcaucaugggcgaguacagaggcacccccagaaaccaggaccuguacgacgccgccaaggccuacgccgagcagcugaaggagaacggcgugaucaacuacagcgugcuggaccugaccgccgaggagcuggaggccaucaagcaccagcugaaccccaaggacaacgacguggagcugugaggacuaguacuggcugcaucucccuuuccucuguccuccauccuucucccaggauggugaagggggaccugguacccagugauccccaccccaggauccuaaaucaugacuuaccugcuaauaaaaacucauuggaaaagugagaagaucuaaaaaaaaaaaaaaaaaaaaaaaaaaaaaaaaaaaaaaaaaaaaaaaaaaaaaaaaaaaaaaaaugcaucccccccccccccccccccccccccccccccaaaggcucuuuucagagccaccagaauu

SEQ ID NO: 20427 - RNA, 1545 nt, Artificial Sequence
  mRNA product Design e-6 comprising derived and/or modified sequence from HRSV(Memphis-37)__AIY60635.1__N (opt5)
gggagagcggcucggccauuuugucccagucaguccggaggcugcggcugcagaaguaccgccugcggaguaacugcaaagaagcuuaccauggcccugagcaaggugaaacucaacgacacccugaauaaggaucagcuucuguccucuagcaaauacacaauccaaagauccacgggcgacucuauugauacccccaacuaugacguccagaagcacaucaauaaacucugcgggaugcugcuuauuacagaggaugcuaaccauaaguucaccggaguuaucggcaugcuguacgccaugagccggcucgggcgcgaagacacaauuaagauccugagagaugcgggauaucacgugaaagcuaauggcguggacgucaccacacaucggcaggauaucaacgggaaggagaugaaauuugaagugcugacccucgccucccugacgaccgagauucagaucaauauugaaaucgagucucgcaagagcuacaaaaagaugcuuaaggagaugggagaaguugccccugaguauagacacgacuccccggauuguggcaugauuauccugugcauugcugcccucgugaucacaaaacuggcugccggcgaccggagcgggcuuaccgcggucauccgcagagccaacaaugugcugaagaacgaaaugaaacgguacaagggacuccugcccaaagauauugcuaauucuuucuaugagguuuuugagaaguacccucauuucaucgacguguuuguccacuucggcauugcccaauccagcacacgcgggggaucuagaguggaaggcaucuuugcugggcuguucaugaacgccuacggagcgggccaggugaugcuccgguggggcguccuggccaaauccguuaagaauauuaugcuugggcacgcuagcgugcaggccgagauggaacagguggucgagguguaugaauacgcucaaaagcugggaggcgaggccggguuuuaucauauccucaacaaucccaaagccucucugcuuucccugacccaguucccucacuuuagcuccguugugcucggaaacgcugcgggccuggggaucaugggagaguaccgcggcacgcccagaaaccaggaccuguaugaugccgcuaaggccuacgccgaacagcucaaagagaauggcgucauuaacuauucugugcuggaccuuacagcugaggaacuggaagccaucaagcaucaacucaauccuaaagauaacgacguugagcugugaggacuaguacuggcugcaucucccuuuccucuguccuccauccuucucccaggauggugaagggggaccugguacccagugauccccaccccaggauccuaaaucaugacuuaccugcuaauaaaaacucauuggaaaagugagaagaucuaaaaaaaaaaaaaaaaaaaaaaaaaaaaaaaaaaaaaaaaaaaaaaaaaaaaaaaaaaaaaaaaugcaucccccccccccccccccccccccccccccccaaaggcucuuuucagagccaccagaauu

SEQ ID NO: 20428 - RNA, 1545 nt, Artificial Sequence
  mRNA product Design e-6 comprising derived and/or modified sequence from HRSV(Memphis-37)__AIY60635.1__N (opt6)
gggagagcggcucggccauuuugucccagucaguccggaggcugcggcugcagaaguaccgccugcggaguaacugcaaagaagcuuaccauggccuuaaguaaaguaaaauuaaacgacacacuaaacaaagaccaauuacucucaucaucgaaauauacaauacaaagauccacaggagacuccauagauacaccaaauuacgacguacaaaaacauauaaacaaacucugcggaauguuauuaauaacagaagacgcaaaccacaaauucacaggagucauagguaugcuauacgcaaugucaagauuaggaagagaagauacaauaaaaauacuaagagacgcaggauaccacguaaaagcaaacggaguagacguaacaacacauagacaagauauaaacgguaaagaaaugaaauucgaaguacuaacacuagccagucuaacaacagaaauacaaauaaacauagaaauagaaagccgaaaaucauacaaaaaaauguuaaaagaaaugggggaaguagcacccgaauacagacaugauucaccugacugcggaaugauaauacucugcauagcggcauuagucauaacaaaacuagccgcaggagacagaagcggauuaacagcaguaauaagaagagcaaauaauguauuaaaaaaugaaaugaaaagguauaaaggauuacuaccaaaagauauagcaaacucauucuaugaaguuuucgaaaaauacccacacuucauagacgucuucguacacuuuggaauagcacaaagcagcacaagaggaggaagcagaguagaaggaauauucgcaggacuauucaugaaugcauacggagccggacaaguaaugcuaagauggggaguuuuagcaaaaagcguaaaaaacauaauguuaggacacgccuccguccaagccgaaauggaacaaguaguagaaguauacgaauaugcacaaaaacuaggaggagaagcaggauucuaucacauacucaauaacccaaaagcaucacuauugagcuuaacacaauucccacauuuuucauccguaguccuaggaaaugcagcaggcuuaggaauaaugggagaauacagaggcacaccaagaaaucaagacuuauacgaugcagcaaaagcauacgcagaacaacuaaaagaaaacggaguaauaaacuacucaguauuagauuuaacagcagaagaauuagaagcaauaaaacaucaacuaaauccuaaggauaaugauguagaacucuaaggacuaguacuggcugcaucucccuuuccucuguccuccauccuucucccaggauggugaagggggaccugguacccagugauccccaccccaggauccuaaaucaugacuuaccugcuaauaaaaacucauuggaaaagugagaagaucuaaaaaaaaaaaaaaaaaaaaaaaaaaaaaaaaaaaaaaaaaaaaaaaaaaaaaaaaaaaaaaaaugcaucccccccccccccccccccccccccccccccaaaggcucuuuucagagccaccagaauu

SEQ ID NO: 20429 - RNA, 1545 nt, Artificial Sequence
  mRNA product Design e-6 comprising derived and/or modified sequence from HRSV(Memphis-37)__AIY60635.1__N (opt11)
gggagagcggcucggccauuuugucccagucaguccggaggcugcggcugcagaaguaccgccugcggaguaacugcaaagaagcuuaccauggcccuaagcaaagucaaacucaacgacacacuaaacaaagaccaacuccucagcuccagcaaauacaccauccaacgauccaccggcgacuccauagacacccccaacuacgacguccaaaaacacaucaacaaacuaugcggcaugcuccuaaucacagaagacgccaaccacaaauucaccggagucaucggcaugcucuacgccaugagccgccucggccgagaagacacaaucaaaauacuaagagacgccggcuaccacguaaaagccaacggcguagacguaaccacccaccgccaagacaucaacggcaaagaaaugaaauucgaaguucucacccucgccucacuaaccacggaaauccaaauaaacauugaaaucgaaagcagaaaauccuacaaaaagaugcuaaaagaaaugggcgagguagccccagaauaccgccacgacagccccgacugcggaaugaucauccucugcauugcagcccucgucaucaccaaacuagccgccggcgacagaagcggccuaaccgcaguaauccgccgagccaacaacguacucaaaaacgaaaugaaacgcuacaaaggccuccuccccaaagacaucgccaacagcuucuacgaaguauucgaaaaauacccgcacuucaucgacgucuucguacacuucggcauagcccaaagcagcacacgaggcggcucccgcgucgaaggaauauucgccggccuguucaugaacgcauacggagcgggccaagucaugcuccgcugggguguacuagccaaguccgucaaaaacaucaugcuagggcacgcaagcguacaagccgaaauggaacaaguagucgaagucuacgaauacgcacaaaaacuaggcggcgaagccggcuucuaccacauccuaaacaaccccaaagccucauuacucucccucacccaauuuccucacuucuccagcgucguccucggaaacgccgccggccuaggcauaaugggggaauaccgcggcaccccgcgcaaccaagaccucuacgacgcagcaaaagccuacgcagaacaacuaaaagaaaacggagucaucaacuacagcguacuggaccuaaccgccgaagaacucgaagccauaaaacaccaacucaaccccaaagacaacgacgucgagcucuaaggacuaguacuggcugcaucucccuuuccucuguccuccauccuucucccaggauggugaagggggaccugguacccagugauccccaccccaggauccuaaaucaugacuuaccugcuaauaaaaacucauuggaaaagugagaagaucuaaaaaaaaaaaaaaaaaaaaaaaaaaaaaaaaaaaaaaaaaaaaaaaaaaaaaaaaaaaaaaaaugcaucccccccccccccccccccccccccccccccaaaggcucuuuucagagccaccagaauu

SEQ ID NO: 20430 - RNA, 1761 nt, Artificial Sequence
  mRNA product Design f-1 comprising derived and/or modified sequence from HRSV(Memphis-37)__AIY60635.1__N (wt)
gggagagcggcucggccauuuugucccagucaguccggaggcugcggcugcagaaguaccgccugcggaguaacugcaaagaagcuuaccauggcucuuagcaaagucaaguugaacgauacacucaacaaagaucaacuucugucauccagcaaauacaccauccaacggagcacaggagauaguauugauacuccuaauuaugaugugcagaaacacaucaacaaguuauguggcauguuauuaaucacagaagaugcuaaucauaaauucacugggguaauagguauguuauaugcuaugucuagauuaggaagagaagacaccauaaaaauacucagagaugcgggauaucauguaaaagcaaauggaguggauguaacaacacaucgucaagacauuaauggaaaagaaaugaaauuugaaguguuaacauuggcaagcuuaacaacugaaauucaaaucaacauugagauagaaucuaggaaauccuacaaaaaaaugcuaaaagaaaugggagagguggcuccagaauacaggcaugacucuccugauuguggaaugauaauauuauguauagcagcauuaguaauaaccaaauuagcagcaggggauagaucuggucuuacugcugugauuaggagagcuaauaauguucuaaaaaaugaaaugaaacguuauaaaggcuuacuaccaaaggauauagccaacagcuucuaugaaguguuugaaaaauauccucacuuuauagauguuuuuguucauuuugguauagcacaaucuucuaccagagguggcaguagaguugaagggauuuuugcaggauuguuuaugaaugccuauggugcagggcaagugauguuacgguggggagucuuagcaaaaucaguuaaaaauauuaugcuaggacaugcuagugugcaagcagaaauggaacaaguuguggaaguuuaugaauaugcccaaaaauuggguggagaagcaggauucuaccauauauugaacaauccaaaagcaucauuauuaucuuugacucaauuuccccacuucuccaguguaguauugggcaaugcugcuggccuaggcauaaugggagaauacagagguacaccaaggaaucaagaucuauaugaugcugcaaaggcauaugcugaacaacucaaagaaaauggugugauuaacuacaguguauuagacuugacagcagaagaacuagaggcuaucaaacaucagcuuaauccaaaagauaaugauguagagcuuugaggacuagugaagggaacacccaaauuuaauucagccuuaagcacaauuaauuaagagugaaacguaauuguacaagcaguuggucacccaccauagggcaugaucaacaccgcaaccuuuccuuuuucccccagugauucugaaaaaccccucuucccuucagcuugcuuagauguuccaaauuuaguaagcuuaaggcggccuacagaagaaaaagaaaaaaaaggccacaaaaguucccucucacuuucaguaaauaaaauaaaagcagcaacagaaauaaagaaauaaaugaaauucaaaaugaaauaaauauuguguugugcagcauuaaaaaaucaauaaaaauuaaaaaugagcaagaucuaaaaaaaaaaaaaaaaaaaaaaaaaaaaaaaaaaaaaaaaaaaaaaaaaaaaaaaaaaaaaaaaugcaucccccccccccccccccccccccccccccccaaaggcucuuuucagagccaccagaauu

SEQ ID NO: 20431 - RNA, 1761 nt, Artificial Sequence
  mRNA product Design f-1 comprising derived and/or modified sequence from HRSV(Memphis-37)__AIY60635.1__N (opt1)
gggagagcggcucggccauuuugucccagucaguccggaggcugcggcugcagaaguaccgccugcggaguaacugcaaagaagcuuaccauggcccugagcaaggugaagcucaacgacacccugaacaaggaccagcugcucuccagcuccaaguacaccauccagcgcagcaccggcgacuccaucgacacccccaacuacgacguccagaagcacaucaacaagcugugcgggaugcugcucaucaccgaggacgccaaccacaaguucaccggcgugaucgggaugcuguacgcgaugagccggcugggccgcgaggacacgaucaagauccuccgggacgccggguaccacgugaaggccaacggcgucgacgugaccacccaccgccaggacaucaacggcaaggagaugaaguucgaggugcugacccuggccucccucacgaccgagauccagaucaacaucgagaucgagagccggaaguccuacaagaagaugcugaaggagaugggggaggucgccccggaguaccgccacgacagccccgacugcggcaugaucauccugugcaucgcggcccucgugaucaccaagcuggccgccggggaccgguccggccugaccgcggugauccgccgggccaacaacguccucaagaacgagaugaagcgcuacaaggggcugcugcccaaggacaucgccaacagcuucuacgagguguucgagaaguacccccacuucaucgacguguucguccacuucggcaucgcccaguccagcacgcggggcgggucccgcguggagggcaucuucgccgggcuguucaugaacgcguacggcgccggccaggugaugcugcgguggggcguccuggccaagagcgugaagaacaucaugcucgggcacgccuccgugcaggccgagauggagcaggucguggagguguacgaguacgcgcagaagcucgggggcgaggccggguucuaccacauccugaacaacccgaaggccagccuccugucccugacccaguucccccacuucagcagcgucgugcucggcaacgccgccggccuggggaucaugggcgaguaccgcgggacgccccggaaccaggaccuguacgacgcggccaaggccuacgccgagcagcucaaggagaacggcgugaucaacuacuccguccuggaccugaccgccgaggagcucgaggcgaucaagcaccagcugaaccccaaggacaacgacguggagcugugaggacuagugaagggaacacccaaauuuaauucagccuuaagcacaauuaauuaagagugaaacguaauuguacaagcaguuggucacccaccauagggcaugaucaacaccgcaaccuuuccuuuuucccccagugauucugaaaaaccccucuucccuucagcuugcuuagauguuccaaauuuaguaagcuuaaggcggccuacagaagaaaaagaaaaaaaaggccacaaaaguucccucucacuuucaguaaauaaaauaaaagcagcaacagaaauaaagaaauaaaugaaauucaaaaugaaauaaauauuguguugugcagcauuaaaaaaucaauaaaaauuaaaaaugagcaagaucuaaaaaaaaaaaaaaaaaaaaaaaaaaaaaaaaaaaaaaaaaaaaaaaaaaaaaaaaaaaaaaaaugcaucccccccccccccccccccccccccccccccaaaggcucuuuucagagccaccagaauu

SEQ ID NO: 20432 - RNA, 1761 nt, Artificial Sequence
  mRNA product Design f-1 comprising derived and/or modified sequence from HRSV(Memphis-37)__AIY60635.1__N (opt2)
gggagagcggcucggccauuuugucccagucaguccggaggcugcggcugcagaaguaccgccugcggaguaacugcaaagaagcuuaccauggcccucuccaaggucaagcucaacgacacccucaacaaggaccagcuccucuccuccuccaaguacaccauccagcgcuccaccggcgacuccaucgacacccccaacuacgacguccagaagcacaucaacaagcucugcggcaugcuccucaucaccgaggacgccaaccacaaguucaccggcgucaucggcaugcucuacgccaugucccgccucggccgcgaggacaccaucaagauccuccgcgacgccggcuaccacgucaaggccaacggcgucgacgucaccacccaccgccaggacaucaacggcaaggagaugaaguucgagguccucacccucgccucccucaccaccgagauccagaucaacaucgagaucgagucccgcaaguccuacaagaagaugcucaaggagaugggcgaggucgcccccgaguaccgccacgacucccccgacugcggcaugaucauccucugcaucgccgcccucgucaucaccaagcucgccgccggcgaccgcuccggccucaccgccgucauccgccgcgccaacaacguccucaagaacgagaugaagcgcuacaagggccuccuccccaaggacaucgccaacuccuucuacgaggucuucgagaaguacccccacuucaucgacgucuucguccacuucggcaucgcccaguccuccacccgcggcggcucccgcgucgagggcaucuucgccggccucuucaugaacgccuacggcgccggccaggucaugcuccgcuggggcguccucgccaaguccgucaagaacaucaugcucggccacgccuccguccaggccgagauggagcaggucgucgaggucuacgaguacgcccagaagcucggcggcgaggccggcuucuaccacauccucaacaaccccaaggccucccuccucucccucacccaguucccccacuucuccuccgucguccucggcaacgccgccggccucggcaucaugggcgaguaccgcggcaccccccgcaaccaggaccucuacgacgccgccaaggccuacgccgagcagcucaaggagaacggcgucaucaacuacuccguccucgaccucaccgccgaggagcucgaggccaucaagcaccagcucaaccccaaggacaacgacgucgagcucugaggacuagugaagggaacacccaaauuuaauucagccuuaagcacaauuaauuaagagugaaacguaauuguacaagcaguuggucacccaccauagggcaugaucaacaccgcaaccuuuccuuuuucccccagugauucugaaaaaccccucuucccuucagcuugcuuagauguuccaaauuuaguaagcuuaaggcggccuacagaagaaaaagaaaaaaaaggccacaaaaguucccucucacuuucaguaaauaaaauaaaagcagcaacagaaauaaagaaauaaaugaaauucaaaaugaaauaaauauuguguugugcagcauuaaaaaaucaauaaaaauuaaaaaugagcaagaucuaaaaaaaaaaaaaaaaaaaaaaaaaaaaaaaaaaaaaaaaaaaaaaaaaaaaaaaaaaaaaaaaugcaucccccccccccccccccccccccccccccccaaaggcucuuuucagagccaccagaauu

SEQ ID NO: 20433 - RNA, 1761 nt, Artificial Sequence
  mRNA product Design f-1 comprising derived and/or modified sequence from HRSV(Memphis-37)__AIY60635.1__N (opt3)
gggagagcggcucggccauuuugucccagucaguccggaggcugcggcugcagaaguaccgccugcggaguaacugcaaagaagcuuaccauggcccugagcaaggugaaacucaacgacacccuuaauaaggaucagcuguuguccucuucaaaauacacaauccaaagaaguacuggcgacagcauugauacgcccaacuaugacguccagaagcacauaaauaaauuaugcgggaugcugcuaaucaccgaggaugcuaaccauaaguucacaggaguuauugguaugcucuacgcaauguccaggcugggccgggaagacacuaucaagauucuucgcgaugccggguaucacgugaaagcgaauggaguagacgugaccacacaucgacaggauaucaacggcaaggagaugaaauuugaaguccugaccuuggcuucucucacuacagagauacagaucaauauugaaaucgagucgcguaagucauacaaaaagaugcugaaggagaugggugaaguggccccugaguauagacacgacagcccagauugugggaugauuauccugugcauagcagcccucguuauuaccaaauuagcugcaggagacaggaguggccugacggccgugauccggcgcgcuaacaauguccuuaagaacgaaaugaaaagauacaagggcuugcugccgaaagauauugccaauuccuucuaugagguguuugagaaguacccccauuucaucgacguauuuguucacuucgggaucgcgcaaucuagcacuaggggagguucccggguggaaggcauuuuugcagggcuauucaugaacgccuacggagcuggccaggucaugcuccgcuggggugugcuggccaaaucagugaagaauauaaugcuugggcacgcaaguguccaggcugagauggaacagguuguggagguauaugaauacgcccaaaagcugggaggcgaggcgggcuuuuaucauaucuugaacaauccuaaagccagccuccugucuuuaacccaguucccacacuuuuccucagugguccuggggaacgcagcuggacucgguauuaugggcgaguaccgagggacacccagaaaccaggaccuuuaugaugccgcuaaggccuacgcagaacagcugaaagagaauggagugaucaacuauagcguuuuggaccuaacugccgaggaacuggaagcuauaaagcaucaacucaauccuaaagauaacgacguggagcugugaggacuagugaagggaacacccaaauuuaauucagccuuaagcacaauuaauuaagagugaaacguaauuguacaagcaguuggucacccaccauagggcaugaucaacaccgcaaccuuuccuuuuucccccagugauucugaaaaaccccucuucccuucagcuugcuuagauguuccaaauuuaguaagcuuaaggcggccuacagaagaaaaagaaaaaaaaggccacaaaaguucccucucacuuucaguaaauaaaauaaaagcagcaacagaaauaaagaaauaaaugaaauucaaaaugaaauaaauauuguguugugcagcauuaaaaaaucaauaaaaauuaaaaaugagcaagaucuaaaaaaaaaaaaaaaaaaaaaaaaaaaaaaaaaaaaaaaaaaaaaaaaaaaaaaaaaaaaaaaaugcaucccccccccccccccccccccccccccccccaaaggcucuuuucagagccaccagaauu

SEQ ID NO: 20434 - RNA, 1761 nt, Artificial Sequence
  mRNA product Design f-1 comprising derived and/or modified sequence from HRSV(Memphis-37)__AIY60635.1__N (opt4)
gggagagcggcucggccauuuugucccagucaguccggaggcugcggcugcagaaguaccgccugcggaguaacugcaaagaagcuuaccauggcccugagcaaggugaagcugaacgacacccugaacaaggaccagcugcugagcagcagcaaguacaccauccagagaagcaccggcgacagcaucgacacccccaacuacgacgugcagaagcacaucaacaagcugugcggcaugcugcugaucaccgaggacgccaaccacaaguucaccggcgugaucggcaugcuguacgccaugagcagacugggcagagaggacaccaucaagauccugagagacgccggcuaccacgugaaggccaacggcguggacgugaccacccacagacaggacaucaacggcaaggagaugaaguucgaggugcugacccuggccagccugaccaccgagauccagaucaacaucgagaucgagagcagaaagagcuacaagaagaugcugaaggagaugggcgagguggcccccgaguacagacacgacagccccgacugcggcaugaucauccugugcaucgccgcccuggugaucaccaagcuggccgccggcgacagaagcggccugaccgccgugaucagaagagccaacaacgugcugaagaacgagaugaagagauacaagggccugcugcccaaggacaucgccaacagcuucuacgagguguucgagaaguacccccacuucaucgacguguucgugcacuucggcaucgcccagagcagcaccagaggcggcagcagaguggagggcaucuucgccggccuguucaugaacgccuacggcgccggccaggugaugcugagauggggcgugcuggccaagagcgugaagaacaucaugcugggccacgccagcgugcaggccgagauggagcaggugguggagguguacgaguacgcccagaagcugggcggcgaggccggcuucuaccacauccugaacaaccccaaggccagccugcugagccugacccaguucccccacuucagcagcguggugcugggcaacgccgccggccugggcaucaugggcgaguacagaggcacccccagaaaccaggaccuguacgacgccgccaaggccuacgccgagcagcugaaggagaacggcgugaucaacuacagcgugcuggaccugaccgccgaggagcuggaggccaucaagcaccagcugaaccccaaggacaacgacguggagcugugaggacuagugaagggaacacccaaauuuaauucagccuuaagcacaauuaauuaagagugaaacguaauuguacaagcaguuggucacccaccauagggcaugaucaacaccgcaaccuuuccuuuuucccccagugauucugaaaaaccccucuucccuucagcuugcuuagauguuccaaauuuaguaagcuuaaggcggccuacagaagaaaaagaaaaaaaaggccacaaaaguucccucucacuuucaguaaauaaaauaaaagcagcaacagaaauaaagaaauaaaugaaauucaaaaugaaauaaauauuguguugugcagcauuaaaaaaucaauaaaaauuaaaaaugagcaagaucuaaaaaaaaaaaaaaaaaaaaaaaaaaaaaaaaaaaaaaaaaaaaaaaaaaaaaaaaaaaaaaaaugcaucccccccccccccccccccccccccccccccaaaggcucuuuucagagccaccagaauu

SEQ ID NO: 20435 - RNA, 1761 nt, Artificial Sequence
  mRNA product Design f-1 comprising derived and/or modified sequence from HRSV(Memphis-37)__AIY60635.1__N (opt5)
gggagagcggcucggccauuuugucccagucaguccggaggcugcggcugcagaaguaccgccugcggaguaacugcaaagaagcuuaccauggcccugagcaaggugaaacucaacgacacccugaauaaggaucagcuucuguccucuagcaaauacacaauccaaagauccacgggcgacucuauugauacccccaacuaugacguccagaagcacaucaauaaacucugcgggaugcugcuuauuacagaggaugcuaaccauaaguucaccggaguuaucggcaugcuguacgccaugagccggcucgggcgcgaagacacaauuaagauccugagagaugcgggauaucacgugaaagcuaauggcguggacgucaccacacaucggcaggauaucaacgggaaggagaugaaauuugaagugcugacccucgccucccugacgaccgagauucagaucaauauugaaaucgagucucgcaagagcuacaaaaagaugcuuaaggagaugggagaaguugccccugaguauagacacgacuccccggauuguggcaugauuauccugugcauugcugcccucgugaucacaaaacuggcugccggcgaccggagcgggcuuaccgcggucauccgcagagccaacaaugugcugaagaacgaaaugaaacgguacaagggacuccugcccaaagauauugcuaauucuuucuaugagguuuuugagaaguacccucauuucaucgacguguuuguccacuucggcauugcccaauccagcacacgcgggggaucuagaguggaaggcaucuuugcugggcuguucaugaacgccuacggagcgggccaggugaugcuccgguggggcguccuggccaaauccguuaagaauauuaugcuugggcacgcuagcgugcaggccgagauggaacagguggucgagguguaugaauacgcucaaaagcugggaggcgaggccggguuuuaucauauccucaacaaucccaaagccucucugcuuucccugacccaguucccucacuuuagcuccguugugcucggaaacgcugcgggccuggggaucaugggagaguaccgcggcacgcccagaaaccaggaccuguaugaugccgcuaaggccuacgccgaacagcucaaagagaauggcgucauuaacuauucugugcuggaccuuacagcugaggaacuggaagccaucaagcaucaacucaauccuaaagauaacgacguugagcugugaggacuagugaagggaacacccaaauuuaauucagccuuaagcacaauuaauuaagagugaaacguaauuguacaagcaguuggucacccaccauagggcaugaucaacaccgcaaccuuuccuuuuucccccagugauucugaaaaaccccucuucccuucagcuugcuuagauguuccaaauuuaguaagcuuaaggcggccuacagaagaaaaagaaaaaaaaggccacaaaaguucccucucacuuucaguaaauaaaauaaaagcagcaacagaaauaaagaaauaaaugaaauucaaaaugaaauaaauauuguguugugcagcauuaaaaaaucaauaaaaauuaaaaaugagcaagaucuaaaaaaaaaaaaaaaaaaaaaaaaaaaaaaaaaaaaaaaaaaaaaaaaaaaaaaaaaaaaaaaaugcaucccccccccccccccccccccccccccccccaaaggcucuuuucagagccaccagaauu

SEQ ID NO: 20436 - RNA, 1761 nt, Artificial Sequence
  mRNA product Design f-1 comprising derived and/or modified sequence from HRSV(Memphis-37)__AIY60635.1__N (opt6)
gggagagcggcucggccauuuugucccagucaguccggaggcugcggcugcagaaguaccgccugcggaguaacugcaaagaagcuuaccauggccuuaaguaaaguaaaauuaaacgacacacuaaacaaagaccaauuacucucaucaucgaaauauacaauacaaagauccacaggagacuccauagauacaccaaauuacgacguacaaaaacauauaaacaaacucugcggaauguuauuaauaacagaagacgcaaaccacaaauucacaggagucauagguaugcuauacgcaaugucaagauuaggaagagaagauacaauaaaaauacuaagagacgcaggauaccacguaaaagcaaacggaguagacguaacaacacauagacaagauauaaacgguaaagaaaugaaauucgaaguacuaacacuagccagucuaacaacagaaauacaaauaaacauagaaauagaaagccgaaaaucauacaaaaaaauguuaaaagaaaugggggaaguagcacccgaauacagacaugauucaccugacugcggaaugauaauacucugcauagcggcauuagucauaacaaaacuagccgcaggagacagaagcggauuaacagcaguaauaagaagagcaaauaauguauuaaaaaaugaaaugaaaagguauaaaggauuacuaccaaaagauauagcaaacucauucuaugaaguuuucgaaaaauacccacacuucauagacgucuucguacacuuuggaauagcacaaagcagcacaagaggaggaagcagaguagaaggaauauucgcaggacuauucaugaaugcauacggagccggacaaguaaugcuaagauggggaguuuuagcaaaaagcguaaaaaacauaauguuaggacacgccuccguccaagccgaaauggaacaaguaguagaaguauacgaauaugcacaaaaacuaggaggagaagcaggauucuaucacauacucaauaacccaaaagcaucacuauugagcuuaacacaauucccacauuuuucauccguaguccuaggaaaugcagcaggcuuaggaauaaugggagaauacagaggcacaccaagaaaucaagacuuauacgaugcagcaaaagcauacgcagaacaacuaaaagaaaacggaguaauaaacuacucaguauuagauuuaacagcagaagaauuagaagcaauaaaacaucaacuaaauccuaaggauaaugauguagaacucuaaggacuagugaagggaacacccaaauuuaauucagccuuaagcacaauuaauuaagagugaaacguaauuguacaagcaguuggucacccaccauagggcaugaucaacaccgcaaccuuuccuuuuucccccagugauucugaaaaaccccucuucccuucagcuugcuuagauguuccaaauuuaguaagcuuaaggcggccuacagaagaaaaagaaaaaaaaggccacaaaaguucccucucacuuucaguaaauaaaauaaaagcagcaacagaaauaaagaaauaaaugaaauucaaaaugaaauaaauauuguguugugcagcauuaaaaaaucaauaaaaauuaaaaaugagcaagaucuaaaaaaaaaaaaaaaaaaaaaaaaaaaaaaaaaaaaaaaaaaaaaaaaaaaaaaaaaaaaaaaaugcaucccccccccccccccccccccccccccccccaaaggcucuuuucagagccaccagaauu

SEQ ID NO: 20437 - RNA, 1761 nt, Artificial Sequence
  mRNA product Design f-1 comprising derived and/or modified sequence from HRSV(Memphis-37)__AIY60635.1__N (opt11)
gggagagcggcucggccauuuugucccagucaguccggaggcugcggcugcagaaguaccgccugcggaguaacugcaaagaagcuuaccauggcccuaagcaaagucaaacucaacgacacacuaaacaaagaccaacuccucagcuccagcaaauacaccauccaacgauccaccggcgacuccauagacacccccaacuacgacguccaaaaacacaucaacaaacuaugcggcaugcuccuaaucacagaagacgccaaccacaaauucaccggagucaucggcaugcucuacgccaugagccgccucggccgagaagacacaaucaaaauacuaagagacgccggcuaccacguaaaagccaacggcguagacguaaccacccaccgccaagacaucaacggcaaagaaaugaaauucgaaguucucacccucgccucacuaaccacggaaauccaaauaaacauugaaaucgaaagcagaaaauccuacaaaaagaugcuaaaagaaaugggcgagguagccccagaauaccgccacgacagccccgacugcggaaugaucauccucugcauugcagcccucgucaucaccaaacuagccgccggcgacagaagcggccuaaccgcaguaauccgccgagccaacaacguacucaaaaacgaaaugaaacgcuacaaaggccuccuccccaaagacaucgccaacagcuucuacgaaguauucgaaaaauacccgcacuucaucgacgucuucguacacuucggcauagcccaaagcagcacacgaggcggcucccgcgucgaaggaauauucgccggccuguucaugaacgcauacggagcgggccaagucaugcuccgcugggguguacuagccaaguccgucaaaaacaucaugcuagggcacgcaagcguacaagccgaaauggaacaaguagucgaagucuacgaauacgcacaaaaacuaggcggcgaagccggcuucuaccacauccuaaacaaccccaaagccucauuacucucccucacccaauuuccucacuucuccagcgucguccucggaaacgccgccggccuaggcauaaugggggaauaccgcggcaccccgcgcaaccaagaccucuacgacgcagcaaaagccuacgcagaacaacuaaaagaaaacggagucaucaacuacagcguacuggaccuaaccgccgaagaacucgaagccauaaaacaccaacucaaccccaaagacaacgacgucgagcucuaaggacuagugaagggaacacccaaauuuaauucagccuuaagcacaauuaauuaagagugaaacguaauuguacaagcaguuggucacccaccauagggcaugaucaacaccgcaaccuuuccuuuuucccccagugauucugaaaaaccccucuucccuucagcuugcuuagauguuccaaauuuaguaagcuuaaggcggccuacagaagaaaaagaaaaaaaaggccacaaaaguucccucucacuuucaguaaauaaaauaaaagcagcaacagaaauaaagaaauaaaugaaauucaaaaugaaauaaauauuguguugugcagcauuaaaaaaucaauaaaaauuaaaaaugagcaagaucuaaaaaaaaaaaaaaaaaaaaaaaaaaaaaaaaaaaaaaaaaaaaaaaaaaaaaaaaaaaaaaaaugcaucccccccccccccccccccccccccccccccaaaggcucuuuucagagccaccagaauu

SEQ ID NO: 20438 - RNA, 1541 nt, Artificial Sequence
  mRNA product Design f-2 comprising derived and/or modified sequence from HRSV(Memphis-37)__AIY60635.1__N (wt)
gggagagcggcucggccauuuugucccagucaguccggaggcugcggcugcagaaguaccgccugcggaguaacugcaaagaagcuuaccauggcucuuagcaaagucaaguugaacgauacacucaacaaagaucaacuucugucauccagcaaauacaccauccaacggagcacaggagauaguauugauacuccuaauuaugaugugcagaaacacaucaacaaguuauguggcauguuauuaaucacagaagaugcuaaucauaaauucacugggguaauagguauguuauaugcuaugucuagauuaggaagagaagacaccauaaaaauacucagagaugcgggauaucauguaaaagcaaauggaguggauguaacaacacaucgucaagacauuaauggaaaagaaaugaaauuugaaguguuaacauuggcaagcuuaacaacugaaauucaaaucaacauugagauagaaucuaggaaauccuacaaaaaaaugcuaaaagaaaugggagagguggcuccagaauacaggcaugacucuccugauuguggaaugauaauauuauguauagcagcauuaguaauaaccaaauuagcagcaggggauagaucuggucuuacugcugugauuaggagagcuaauaauguucuaaaaaaugaaaugaaacguuauaaaggcuuacuaccaaaggauauagccaacagcuucuaugaaguguuugaaaaauauccucacuuuauagauguuuuuguucauuuugguauagcacaaucuucuaccagagguggcaguagaguugaagggauuuuugcaggauuguuuaugaaugccuauggugcagggcaagugauguuacgguggggagucuuagcaaaaucaguuaaaaauauuaugcuaggacaugcuagugugcaagcagaaauggaacaaguuguggaaguuuaugaauaugcccaaaaauuggguggagaagcaggauucuaccauauauugaacaauccaaaagcaucauuauuaucuuugacucaauuuccccacuucuccaguguaguauugggcaaugcugcuggccuaggcauaaugggagaauacagagguacaccaaggaaucaagaucuauaugaugcugcaaaggcauaugcugaacaacucaaagaaaauggugugauuaacuacaguguauuagacuugacagcagaagaacuagaggcuaucaaacaucagcuuaauccaaaagauaaugauguagagcuuugaggacuaguggaagcauuuuccuggcugauuaaaagaaauuacucagcuauggucaucuguuccuguuagaaggcuaugcagcauauuauauacuaugcgcauguuaugaaaugcauaauaaaaaauuuuaaaaaaucuaaaagaucuaaaaaaaaaaaaaaaaaaaaaaaaaaaaaaaaaaaaaaaaaaaaaaaaaaaaaaaaaaaaaaaaugcaucccccccccccccccccccccccccccccccaaaggcucuuuucagagccaccagaauu

SEQ ID NO: 20439 - RNA, 1541 nt, Artificial Sequence
  mRNA product Design f-2 comprising derived and/or modified sequence from HRSV(Memphis-37)__AIY60635.1__N (opt1)
gggagagcggcucggccauuuugucccagucaguccggaggcugcggcugcagaaguaccgccugcggaguaacugcaaagaagcuuaccauggcccugagcaaggugaagcucaacgacacccugaacaaggaccagcugcucuccagcuccaaguacaccauccagcgcagcaccggcgacuccaucgacacccccaacuacgacguccagaagcacaucaacaagcugugcgggaugcugcucaucaccgaggacgccaaccacaaguucaccggcgugaucgggaugcuguacgcgaugagccggcugggccgcgaggacacgaucaagauccuccgggacgccggguaccacgugaaggccaacggcgucgacgugaccacccaccgccaggacaucaacggcaaggagaugaaguucgaggugcugacccuggccucccucacgaccgagauccagaucaacaucgagaucgagagccggaaguccuacaagaagaugcugaaggagaugggggaggucgccccggaguaccgccacgacagccccgacugcggcaugaucauccugugcaucgcggcccucgugaucaccaagcuggccgccggggaccgguccggccugaccgcggugauccgccgggccaacaacguccucaagaacgagaugaagcgcuacaaggggcugcugcccaaggacaucgccaacagcuucuacgagguguucgagaaguacccccacuucaucgacguguucguccacuucggcaucgcccaguccagcacgcggggcgggucccgcguggagggcaucuucgccgggcuguucaugaacgcguacggcgccggccaggugaugcugcgguggggcguccuggccaagagcgugaagaacaucaugcucgggcacgccuccgugcaggccgagauggagcaggucguggagguguacgaguacgcgcagaagcucgggggcgaggccggguucuaccacauccugaacaacccgaaggccagccuccugucccugacccaguucccccacuucagcagcgucgugcucggcaacgccgccggccuggggaucaugggcgaguaccgcgggacgccccggaaccaggaccuguacgacgcggccaaggccuacgccgagcagcucaaggagaacggcgugaucaacuacuccguccuggaccugaccgccgaggagcucgaggcgaucaagcaccagcugaaccccaaggacaacgacguggagcugugaggacuaguggaagcauuuuccuggcugauuaaaagaaauuacucagcuauggucaucuguuccuguuagaaggcuaugcagcauauuauauacuaugcgcauguuaugaaaugcauaauaaaaaauuuuaaaaaaucuaaaagaucuaaaaaaaaaaaaaaaaaaaaaaaaaaaaaaaaaaaaaaaaaaaaaaaaaaaaaaaaaaaaaaaaugcaucccccccccccccccccccccccccccccccaaaggcucuuuucagagccaccagaauu

SEQ ID NO: 20440 - RNA, 1541 nt, Artificial Sequence
  mRNA product Design f-2 comprising derived and/or modified sequence from HRSV(Memphis-37)__AIY60635.1__N (opt2)
gggagagcggcucggccauuuugucccagucaguccggaggcugcggcugcagaaguaccgccugcggaguaacugcaaagaagcuuaccauggcccucuccaaggucaagcucaacgacacccucaacaaggaccagcuccucuccuccuccaaguacaccauccagcgcuccaccggcgacuccaucgacacccccaacuacgacguccagaagcacaucaacaagcucugcggcaugcuccucaucaccgaggacgccaaccacaaguucaccggcgucaucggcaugcucuacgccaugucccgccucggccgcgaggacaccaucaagauccuccgcgacgccggcuaccacgucaaggccaacggcgucgacgucaccacccaccgccaggacaucaacggcaaggagaugaaguucgagguccucacccucgccucccucaccaccgagauccagaucaacaucgagaucgagucccgcaaguccuacaagaagaugcucaaggagaugggcgaggucgcccccgaguaccgccacgacucccccgacugcggcaugaucauccucugcaucgccgcccucgucaucaccaagcucgccgccggcgaccgcuccggccucaccgccgucauccgccgcgccaacaacguccucaagaacgagaugaagcgcuacaagggccuccuccccaaggacaucgccaacuccuucuacgaggucuucgagaaguacccccacuucaucgacgucuucguccacuucggcaucgcccaguccuccacccgcggcggcucccgcgucgagggcaucuucgccggccucuucaugaacgccuacggcgccggccaggucaugcuccgcuggggcguccucgccaaguccgucaagaacaucaugcucggccacgccuccguccaggccgagauggagcaggucgucgaggucuacgaguacgcccagaagcucggcggcgaggccggcuucuaccacauccucaacaaccccaaggccucccuccucucccucacccaguucccccacuucuccuccgucguccucggcaacgccgccggccucggcaucaugggcgaguaccgcggcaccccccgcaaccaggaccucuacgacgccgccaaggccuacgccgagcagcucaaggagaacggcgucaucaacuacuccguccucgaccucaccgccgaggagcucgaggccaucaagcaccagcucaaccccaaggacaacgacgucgagcucugaggacuaguggaagcauuuuccuggcugauuaaaagaaauuacucagcuauggucaucuguuccuguuagaaggcuaugcagcauauuauauacuaugcgcauguuaugaaaugcauaauaaaaaauuuuaaaaaaucuaaaagaucuaaaaaaaaaaaaaaaaaaaaaaaaaaaaaaaaaaaaaaaaaaaaaaaaaaaaaaaaaaaaaaaaugcaucccccccccccccccccccccccccccccccaaaggcucuuuucagagccaccagaauu

SEQ ID NO: 20441 - RNA, 1541 nt, Artificial Sequence
  mRNA product Design f-2 comprising derived and/or modified sequence from HRSV(Memphis-37)__AIY60635.1__N (opt3)
gggagagcggcucggccauuuugucccagucaguccggaggcugcggcugcagaaguaccgccugcggaguaacugcaaagaagcuuaccauggcccugagcaaggugaaacucaacgacacccuuaauaaggaucagcuguuguccucuucaaaauacacaauccaaagaaguacuggcgacagcauugauacgcccaacuaugacguccagaagcacauaaauaaauuaugcgggaugcugcuaaucaccgaggaugcuaaccauaaguucacaggaguuauugguaugcucuacgcaauguccaggcugggccgggaagacacuaucaagauucuucgcgaugccggguaucacgugaaagcgaauggaguagacgugaccacacaucgacaggauaucaacggcaaggagaugaaauuugaaguccugaccuuggcuucucucacuacagagauacagaucaauauugaaaucgagucgcguaagucauacaaaaagaugcugaaggagaugggugaaguggccccugaguauagacacgacagcccagauugugggaugauuauccugugcauagcagcccucguuauuaccaaauuagcugcaggagacaggaguggccugacggccgugauccggcgcgcuaacaauguccuuaagaacgaaaugaaaagauacaagggcuugcugccgaaagauauugccaauuccuucuaugagguguuugagaaguacccccauuucaucgacguauuuguucacuucgggaucgcgcaaucuagcacuaggggagguucccggguggaaggcauuuuugcagggcuauucaugaacgccuacggagcuggccaggucaugcuccgcuggggugugcuggccaaaucagugaagaauauaaugcuugggcacgcaaguguccaggcugagauggaacagguuguggagguauaugaauacgcccaaaagcugggaggcgaggcgggcuuuuaucauaucuugaacaauccuaaagccagccuccugucuuuaacccaguucccacacuuuuccucagugguccuggggaacgcagcuggacucgguauuaugggcgaguaccgagggacacccagaaaccaggaccuuuaugaugccgcuaaggccuacgcagaacagcugaaagagaauggagugaucaacuauagcguuuuggaccuaacugccgaggaacuggaagcuauaaagcaucaacucaauccuaaagauaacgacguggagcugugaggacuaguggaagcauuuuccuggcugauuaaaagaaauuacucagcuauggucaucuguuccuguuagaaggcuaugcagcauauuauauacuaugcgcauguuaugaaaugcauaauaaaaaauuuuaaaaaaucuaaaagaucuaaaaaaaaaaaaaaaaaaaaaaaaaaaaaaaaaaaaaaaaaaaaaaaaaaaaaaaaaaaaaaaaugcaucccccccccccccccccccccccccccccccaaaggcucuuuucagagccaccagaauu

SEQ ID NO: 20442 - RNA, 1541 nt, Artificial Sequence
  mRNA product Design f-2 comprising derived and/or modified sequence from HRSV(Memphis-37)__AIY60635.1__N (opt4)
gggagagcggcucggccauuuugucccagucaguccggaggcugcggcugcagaaguaccgccugcggaguaacugcaaagaagcuuaccauggcccugagcaaggugaagcugaacgacacccugaacaaggaccagcugcugagcagcagcaaguacaccauccagagaagcaccggcgacagcaucgacacccccaacuacgacgugcagaagcacaucaacaagcugugcggcaugcugcugaucaccgaggacgccaaccacaaguucaccggcgugaucggcaugcuguacgccaugagcagacugggcagagaggacaccaucaagauccugagagacgccggcuaccacgugaaggccaacggcguggacgugaccacccacagacaggacaucaacggcaaggagaugaaguucgaggugcugacccuggccagccugaccaccgagauccagaucaacaucgagaucgagagcagaaagagcuacaagaagaugcugaaggagaugggcgagguggcccccgaguacagacacgacagccccgacugcggcaugaucauccugugcaucgccgcccuggugaucaccaagcuggccgccggcgacagaagcggccugaccgccgugaucagaagagccaacaacgugcugaagaacgagaugaagagauacaagggccugcugcccaaggacaucgccaacagcuucuacgagguguucgagaaguacccccacuucaucgacguguucgugcacuucggcaucgcccagagcagcaccagaggcggcagcagaguggagggcaucuucgccggccuguucaugaacgccuacggcgccggccaggugaugcugagauggggcgugcuggccaagagcgugaagaacaucaugcugggccacgccagcgugcaggccgagauggagcaggugguggagguguacgaguacgcccagaagcugggcggcgaggccggcuucuaccacauccugaacaaccccaaggccagccugcugagccugacccaguucccccacuucagcagcguggugcugggcaacgccgccggccugggcaucaugggcgaguacagaggcacccccagaaaccaggaccuguacgacgccgccaaggccuacgccgagcagcugaaggagaacggcgugaucaacuacagcgugcuggaccugaccgccgaggagcuggaggccaucaagcaccagcugaaccccaaggacaacgacguggagcugugaggacuaguggaagcauuuuccuggcugauuaaaagaaauuacucagcuauggucaucuguuccuguuagaaggcuaugcagcauauuauauacuaugcgcauguuaugaaaugcauaauaaaaaauuuuaaaaaaucuaaaagaucuaaaaaaaaaaaaaaaaaaaaaaaaaaaaaaaaaaaaaaaaaaaaaaaaaaaaaaaaaaaaaaaaugcaucccccccccccccccccccccccccccccccaaaggcucuuuucagagccaccagaauu

SEQ ID NO: 20443 - RNA, 1541 nt, Artificial Sequence
  mRNA product Design f-2 comprising derived and/or modified sequence from HRSV(Memphis-37)__AIY60635.1__N (opt5)
gggagagcggcucggccauuuugucccagucaguccggaggcugcggcugcagaaguaccgccugcggaguaacugcaaagaagcuuaccauggcccugagcaaggugaaacucaacgacacccugaauaaggaucagcuucuguccucuagcaaauacacaauccaaagauccacgggcgacucuauugauacccccaacuaugacguccagaagcacaucaauaaacucugcgggaugcugcuuauuacagaggaugcuaaccauaaguucaccggaguuaucggcaugcuguacgccaugagccggcucgggcgcgaagacacaauuaagauccugagagaugcgggauaucacgugaaagcuaauggcguggacgucaccacacaucggcaggauaucaacgggaaggagaugaaauuugaagugcugacccucgccucccugacgaccgagauucagaucaauauugaaaucgagucucgcaagagcuacaaaaagaugcuuaaggagaugggagaaguugccccugaguauagacacgacuccccggauuguggcaugauuauccugugcauugcugcccucgugaucacaaaacuggcugccggcgaccggagcgggcuuaccgcggucauccgcagagccaacaaugugcugaagaacgaaaugaaacgguacaagggacuccugcccaaagauauugcuaauucuuucuaugagguuuuugagaaguacccucauuucaucgacguguuuguccacuucggcauugcccaauccagcacacgcgggggaucuagaguggaaggcaucuuugcugggcuguucaugaacgccuacggagcgggccaggugaugcuccgguggggcguccuggccaaauccguuaagaauauuaugcuugggcacgcuagcgugcaggccgagauggaacagguggucgagguguaugaauacgcucaaaagcugggaggcgaggccggguuuuaucauauccucaacaaucccaaagccucucugcuuucccugacccaguucccucacuuuagcuccguugugcucggaaacgcugcgggccuggggaucaugggagaguaccgcggcacgcccagaaaccaggaccuguaugaugccgcuaaggccuacgccgaacagcucaaagagaauggcgucauuaacuauucugugcuggaccuuacagcugaggaacuggaagccaucaagcaucaacucaauccuaaagauaacgacguugagcugugaggacuaguggaagcauuuuccuggcugauuaaaagaaauuacucagcuauggucaucuguuccuguuagaaggcuaugcagcauauuauauacuaugcgcauguuaugaaaugcauaauaaaaaauuuuaaaaaaucuaaaagaucuaaaaaaaaaaaaaaaaaaaaaaaaaaaaaaaaaaaaaaaaaaaaaaaaaaaaaaaaaaaaaaaaugcaucccccccccccccccccccccccccccccccaaaggcucuuuucagagccaccagaauu

SEQ ID NO: 20444 - RNA, 1541 nt, Artificial Sequence
  mRNA product Design f-2 comprising derived and/or modified sequence from HRSV(Memphis-37)__AIY60635.1__N (opt6)
gggagagcggcucggccauuuugucccagucaguccggaggcugcggcugcagaaguaccgccugcggaguaacugcaaagaagcuuaccauggccuuaaguaaaguaaaauuaaacgacacacuaaacaaagaccaauuacucucaucaucgaaauauacaauacaaagauccacaggagacuccauagauacaccaaauuacgacguacaaaaacauauaaacaaacucugcggaauguuauuaauaacagaagacgcaaaccacaaauucacaggagucauagguaugcuauacgcaaugucaagauuaggaagagaagauacaauaaaaauacuaagagacgcaggauaccacguaaaagcaaacggaguagacguaacaacacauagacaagauauaaacgguaaagaaaugaaauucgaaguacuaacacuagccagucuaacaacagaaauacaaauaaacauagaaauagaaagccgaaaaucauacaaaaaaauguuaaaagaaaugggggaaguagcacccgaauacagacaugauucaccugacugcggaaugauaauacucugcauagcggcauuagucauaacaaaacuagccgcaggagacagaagcggauuaacagcaguaauaagaagagcaaauaauguauuaaaaaaugaaaugaaaagguauaaaggauuacuaccaaaagauauagcaaacucauucuaugaaguuuucgaaaaauacccacacuucauagacgucuucguacacuuuggaauagcacaaagcagcacaagaggaggaagcagaguagaaggaauauucgcaggacuauucaugaaugcauacggagccggacaaguaaugcuaagauggggaguuuuagcaaaaagcguaaaaaacauaauguuaggacacgccuccguccaagccgaaauggaacaaguaguagaaguauacgaauaugcacaaaaacuaggaggagaagcaggauucuaucacauacucaauaacccaaaagcaucacuauugagcuuaacacaauucccacauuuuucauccguaguccuaggaaaugcagcaggcuuaggaauaaugggagaauacagaggcacaccaagaaaucaagacuuauacgaugcagcaaaagcauacgcagaacaacuaaaagaaaacggaguaauaaacuacucaguauuagauuuaacagcagaagaauuagaagcaauaaaacaucaacuaaauccuaaggauaaugauguagaacucuaaggacuaguggaagcauuuuccuggcugauuaaaagaaauuacucagcuauggucaucuguuccuguuagaaggcuaugcagcauauuauauacuaugcgcauguuaugaaaugcauaauaaaaaauuuuaaaaaaucuaaaagaucuaaaaaaaaaaaaaaaaaaaaaaaaaaaaaaaaaaaaaaaaaaaaaaaaaaaaaaaaaaaaaaaaugcaucccccccccccccccccccccccccccccccaaaggcucuuuucagagccaccagaauu

SEQ ID NO: 20445 - RNA, 1541 nt, Artificial Sequence
  mRNA product Design f-2 comprising derived and/or modified sequence from HRSV(Memphis-37)__AIY60635.1__N (opt11)
gggagagcggcucggccauuuugucccagucaguccggaggcugcggcugcagaaguaccgccugcggaguaacugcaaagaagcuuaccauggcccuaagcaaagucaaacucaacgacacacuaaacaaagaccaacuccucagcuccagcaaauacaccauccaacgauccaccggcgacuccauagacacccccaacuacgacguccaaaaacacaucaacaaacuaugcggcaugcuccuaaucacagaagacgccaaccacaaauucaccggagucaucggcaugcucuacgccaugagccgccucggccgagaagacacaaucaaaauacuaagagacgccggcuaccacguaaaagccaacggcguagacguaaccacccaccgccaagacaucaacggcaaagaaaugaaauucgaaguucucacccucgccucacuaaccacggaaauccaaauaaacauugaaaucgaaagcagaaaauccuacaaaaagaugcuaaaagaaaugggcgagguagccccagaauaccgccacgacagccccgacugcggaaugaucauccucugcauugcagcccucgucaucaccaaacuagccgccggcgacagaagcggccuaaccgcaguaauccgccgagccaacaacguacucaaaaacgaaaugaaacgcuacaaaggccuccuccccaaagacaucgccaacagcuucuacgaaguauucgaaaaauacccgcacuucaucgacgucuucguacacuucggcauagcccaaagcagcacacgaggcggcucccgcgucgaaggaauauucgccggccuguucaugaacgcauacggagcgggccaagucaugcuccgcugggguguacuagccaaguccgucaaaaacaucaugcuagggcacgcaagcguacaagccgaaauggaacaaguagucgaagucuacgaauacgcacaaaaacuaggcggcgaagccggcuucuaccacauccuaaacaaccccaaagccucauuacucucccucacccaauuuccucacuucuccagcgucguccucggaaacgccgccggccuaggcauaaugggggaauaccgcggcaccccgcgcaaccaagaccucuacgacgcagcaaaagccuacgcagaacaacuaaaagaaaacggagucaucaacuacagcguacuggaccuaaccgccgaagaacucgaagccauaaaacaccaacucaaccccaaagacaacgacgucgagcucuaaggacuaguggaagcauuuuccuggcugauuaaaagaaauuacucagcuauggucaucuguuccuguuagaaggcuaugcagcauauuauauacuaugcgcauguuaugaaaugcauaauaaaaaauuuuaaaaaaucuaaaagaucuaaaaaaaaaaaaaaaaaaaaaaaaaaaaaaaaaaaaaaaaaaaaaaaaaaaaaaaaaaaaaaaaugcaucccccccccccccccccccccccccccccccaaaggcucuuuucagagccaccagaauu

SEQ ID NO: 20446 - RNA, 1532 nt, Artificial Sequence
  mRNA product Design f-3 comprising derived and/or modified sequence from HRSV(Memphis-37)__AIY60635.1__N (wt)
gggagagucccgcagucggcguccagcggcucugcuuguucgugugugugucguugcaggccuuauucaagcuuaccauggcucuuagcaaagucaaguugaacgauacacucaacaaagaucaacuucugucauccagcaaauacaccauccaacggagcacaggagauaguauugauacuccuaauuaugaugugcagaaacacaucaacaaguuauguggcauguuauuaaucacagaagaugcuaaucauaaauucacugggguaauagguauguuauaugcuaugucuagauuaggaagagaagacaccauaaaaauacucagagaugcgggauaucauguaaaagcaaauggaguggauguaacaacacaucgucaagacauuaauggaaaagaaaugaaauuugaaguguuaacauuggcaagcuuaacaacugaaauucaaaucaacauugagauagaaucuaggaaauccuacaaaaaaaugcuaaaagaaaugggagagguggcuccagaauacaggcaugacucuccugauuguggaaugauaauauuauguauagcagcauuaguaauaaccaaauuagcagcaggggauagaucuggucuuacugcugugauuaggagagcuaauaauguucuaaaaaaugaaaugaaacguuauaaaggcuuacuaccaaaggauauagccaacagcuucuaugaaguguuugaaaaauauccucacuuuauagauguuuuuguucauuuugguauagcacaaucuucuaccagagguggcaguagaguugaagggauuuuugcaggauuguuuaugaaugccuauggugcagggcaagugauguuacgguggggagucuuagcaaaaucaguuaaaaauauuaugcuaggacaugcuagugugcaagcagaaauggaacaaguuguggaaguuuaugaauaugcccaaaaauuggguggagaagcaggauucuaccauauauugaacaauccaaaagcaucauuauuaucuuugacucaauuuccccacuucuccaguguaguauugggcaaugcugcuggccuaggcauaaugggagaauacagagguacaccaaggaaucaagaucuauaugaugcugcaaaggcauaugcugaacaacucaaagaaaauggugugauuaacuacaguguauuagacuugacagcagaagaacuagaggcuaucaaacaucagcuuaauccaaaagauaaugauguagagcuuugaggacuaguacuggcugcaucucccuuuccucuguccuccauccuucucccaggauggugaagggggaccugguacccagugauccccaccccaggauccuaaaucaugacuuaccugcuaauaaaaacucauuggaaaagugagaagaucuaaaaaaaaaaaaaaaaaaaaaaaaaaaaaaaaaaaaaaaaaaaaaaaaaaaaaaaaaaaaaaaaugcaucccccccccccccccccccccccccccccccaaaggcucuuuucagagccaccagaauu

SEQ ID NO: 20447 - RNA, 1532 nt, Artificial Sequence
  mRNA product Design f-3 comprising derived and/or modified sequence from HRSV(Memphis-37)__AIY60635.1__N (opt1)
gggagagucccgcagucggcguccagcggcucugcuuguucgugugugugucguugcaggccuuauucaagcuuaccauggcccugagcaaggugaagcucaacgacacccugaacaaggaccagcugcucuccagcuccaaguacaccauccagcgcagcaccggcgacuccaucgacacccccaacuacgacguccagaagcacaucaacaagcugugcgggaugcugcucaucaccgaggacgccaaccacaaguucaccggcgugaucgggaugcuguacgcgaugagccggcugggccgcgaggacacgaucaagauccuccgggacgccggguaccacgugaaggccaacggcgucgacgugaccacccaccgccaggacaucaacggcaaggagaugaaguucgaggugcugacccuggccucccucacgaccgagauccagaucaacaucgagaucgagagccggaaguccuacaagaagaugcugaaggagaugggggaggucgccccggaguaccgccacgacagccccgacugcggcaugaucauccugugcaucgcggcccucgugaucaccaagcuggccgccggggaccgguccggccugaccgcggugauccgccgggccaacaacguccucaagaacgagaugaagcgcuacaaggggcugcugcccaaggacaucgccaacagcuucuacgagguguucgagaaguacccccacuucaucgacguguucguccacuucggcaucgcccaguccagcacgcggggcgggucccgcguggagggcaucuucgccgggcuguucaugaacgcguacggcgccggccaggugaugcugcgguggggcguccuggccaagagcgugaagaacaucaugcucgggcacgccuccgugcaggccgagauggagcaggucguggagguguacgaguacgcgcagaagcucgggggcgaggccggguucuaccacauccugaacaacccgaaggccagccuccugucccugacccaguucccccacuucagcagcgucgugcucggcaacgccgccggccuggggaucaugggcgaguaccgcgggacgccccggaaccaggaccuguacgacgcggccaaggccuacgccgagcagcucaaggagaacggcgugaucaacuacuccguccuggaccugaccgccgaggagcucgaggcgaucaagcaccagcugaaccccaaggacaacgacguggagcugugaggacuaguacuggcugcaucucccuuuccucuguccuccauccuucucccaggauggugaagggggaccugguacccagugauccccaccccaggauccuaaaucaugacuuaccugcuaauaaaaacucauuggaaaagugagaagaucuaaaaaaaaaaaaaaaaaaaaaaaaaaaaaaaaaaaaaaaaaaaaaaaaaaaaaaaaaaaaaaaaugcaucccccccccccccccccccccccccccccccaaaggcucuuuucagagccaccagaauu

SEQ ID NO: 20448 - RNA, 1532 nt, Artificial Sequence
  mRNA product Design f-3 comprising derived and/or modified sequence from HRSV(Memphis-37)__AIY60635.1__N (opt2)
gggagagucccgcagucggcguccagcggcucugcuuguucgugugugugucguugcaggccuuauucaagcuuaccauggcccucuccaaggucaagcucaacgacacccucaacaaggaccagcuccucuccuccuccaaguacaccauccagcgcuccaccggcgacuccaucgacacccccaacuacgacguccagaagcacaucaacaagcucugcggcaugcuccucaucaccgaggacgccaaccacaaguucaccggcgucaucggcaugcucuacgccaugucccgccucggccgcgaggacaccaucaagauccuccgcgacgccggcuaccacgucaaggccaacggcgucgacgucaccacccaccgccaggacaucaacggcaaggagaugaaguucgagguccucacccucgccucccucaccaccgagauccagaucaacaucgagaucgagucccgcaaguccuacaagaagaugcucaaggagaugggcgaggucgcccccgaguaccgccacgacucccccgacugcggcaugaucauccucugcaucgccgcccucgucaucaccaagcucgccgccggcgaccgcuccggccucaccgccgucauccgccgcgccaacaacguccucaagaacgagaugaagcgcuacaagggccuccuccccaaggacaucgccaacuccuucuacgaggucuucgagaaguacccccacuucaucgacgucuucguccacuucggcaucgcccaguccuccacccgcggcggcucccgcgucgagggcaucuucgccggccucuucaugaacgccuacggcgccggccaggucaugcuccgcuggggcguccucgccaaguccgucaagaacaucaugcucggccacgccuccguccaggccgagauggagcaggucgucgaggucuacgaguacgcccagaagcucggcggcgaggccggcuucuaccacauccucaacaaccccaaggccucccuccucucccucacccaguucccccacuucuccuccgucguccucggcaacgccgccggccucggcaucaugggcgaguaccgcggcaccccccgcaaccaggaccucuacgacgccgccaaggccuacgccgagcagcucaaggagaacggcgucaucaacuacuccguccucgaccucaccgccgaggagcucgaggccaucaagcaccagcucaaccccaaggacaacgacgucgagcucugaggacuaguacuggcugcaucucccuuuccucuguccuccauccuucucccaggauggugaagggggaccugguacccagugauccccaccccaggauccuaaaucaugacuuaccugcuaauaaaaacucauuggaaaagugagaagaucuaaaaaaaaaaaaaaaaaaaaaaaaaaaaaaaaaaaaaaaaaaaaaaaaaaaaaaaaaaaaaaaaugcaucccccccccccccccccccccccccccccccaaaggcucuuuucagagccaccagaauu

SEQ ID NO: 20449 - RNA, 1532 nt, Artificial Sequence
  mRNA product Design f-3 comprising derived and/or modified sequence from HRSV(Memphis-37)__AIY60635.1__N (opt3)
gggagagucccgcagucggcguccagcggcucugcuuguucgugugugugucguugcaggccuuauucaagcuuaccauggcccugagcaaggugaaacucaacgacacccuuaauaaggaucagcuguuguccucuucaaaauacacaauccaaagaaguacuggcgacagcauugauacgcccaacuaugacguccagaagcacauaaauaaauuaugcgggaugcugcuaaucaccgaggaugcuaaccauaaguucacaggaguuauugguaugcucuacgcaauguccaggcugggccgggaagacacuaucaagauucuucgcgaugccggguaucacgugaaagcgaauggaguagacgugaccacacaucgacaggauaucaacggcaaggagaugaaauuugaaguccugaccuuggcuucucucacuacagagauacagaucaauauugaaaucgagucgcguaagucauacaaaaagaugcugaaggagaugggugaaguggccccugaguauagacacgacagcccagauugugggaugauuauccugugcauagcagcccucguuauuaccaaauuagcugcaggagacaggaguggccugacggccgugauccggcgcgcuaacaauguccuuaagaacgaaaugaaaagauacaagggcuugcugccgaaagauauugccaauuccuucuaugagguguuugagaaguacccccauuucaucgacguauuuguucacuucgggaucgcgcaaucuagcacuaggggagguucccggguggaaggcauuuuugcagggcuauucaugaacgccuacggagcuggccaggucaugcuccgcuggggugugcuggccaaaucagugaagaauauaaugcuugggcacgcaaguguccaggcugagauggaacagguuguggagguauaugaauacgcccaaaagcugggaggcgaggcgggcuuuuaucauaucuugaacaauccuaaagccagccuccugucuuuaacccaguucccacacuuuuccucagugguccuggggaacgcagcuggacucgguauuaugggcgaguaccgagggacacccagaaaccaggaccuuuaugaugccgcuaaggccuacgcagaacagcugaaagagaauggagugaucaacuauagcguuuuggaccuaacugccgaggaacuggaagcuauaaagcaucaacucaauccuaaagauaacgacguggagcugugaggacuaguacuggcugcaucucccuuuccucuguccuccauccuucucccaggauggugaagggggaccugguacccagugauccccaccccaggauccuaaaucaugacuuaccugcuaauaaaaacucauuggaaaagugagaagaucuaaaaaaaaaaaaaaaaaaaaaaaaaaaaaaaaaaaaaaaaaaaaaaaaaaaaaaaaaaaaaaaaugcaucccccccccccccccccccccccccccccccaaaggcucuuuucagagccaccagaauu

SEQ ID NO: 20450 - RNA, 1532 nt, Artificial Sequence
  mRNA product Design f-3 comprising derived and/or modified sequence from HRSV(Memphis-37)__AIY60635.1__N (opt4)
gggagagucccgcagucggcguccagcggcucugcuuguucgugugugugucguugcaggccuuauucaagcuuaccauggcccugagcaaggugaagcugaacgacacccugaacaaggaccagcugcugagcagcagcaaguacaccauccagagaagcaccggcgacagcaucgacacccccaacuacgacgugcagaagcacaucaacaagcugugcggcaugcugcugaucaccgaggacgccaaccacaaguucaccggcgugaucggcaugcuguacgccaugagcagacugggcagagaggacaccaucaagauccugagagacgccggcuaccacgugaaggccaacggcguggacgugaccacccacagacaggacaucaacggcaaggagaugaaguucgaggugcugacccuggccagccugaccaccgagauccagaucaacaucgagaucgagagcagaaagagcuacaagaagaugcugaaggagaugggcgagguggcccccgaguacagacacgacagccccgacugcggcaugaucauccugugcaucgccgcccuggugaucaccaagcuggccgccggcgacagaagcggccugaccgccgugaucagaagagccaacaacgugcugaagaacgagaugaagagauacaagggccugcugcccaaggacaucgccaacagcuucuacgagguguucgagaaguacccccacuucaucgacguguucgugcacuucggcaucgcccagagcagcaccagaggcggcagcagaguggagggcaucuucgccggccuguucaugaacgccuacggcgccggccaggugaugcugagauggggcgugcuggccaagagcgugaagaacaucaugcugggccacgccagcgugcaggccgagauggagcaggugguggagguguacgaguacgcccagaagcugggcggcgaggccggcuucuaccacauccugaacaaccccaaggccagccugcugagccugacccaguucccccacuucagcagcguggugcugggcaacgccgccggccugggcaucaugggcgaguacagaggcacccccagaaaccaggaccuguacgacgccgccaaggccuacgccgagcagcugaaggagaacggcgugaucaacuacagcgugcuggaccugaccgccgaggagcuggaggccaucaagcaccagcugaaccccaaggacaacgacguggagcugugaggacuaguacuggcugcaucucccuuuccucuguccuccauccuucucccaggauggugaagggggaccugguacccagugauccccaccccaggauccuaaaucaugacuuaccugcuaauaaaaacucauuggaaaagugagaagaucuaaaaaaaaaaaaaaaaaaaaaaaaaaaaaaaaaaaaaaaaaaaaaaaaaaaaaaaaaaaaaaaaugcaucccccccccccccccccccccccccccccccaaaggcucuuuucagagccaccagaauu

SEQ ID NO: 20451 - RNA, 1532 nt, Artificial Sequence
  mRNA product Design f-3 comprising derived and/or modified sequence from HRSV(Memphis-37)__AIY60635.1__N (opt5)
gggagagucccgcagucggcguccagcggcucugcuuguucgugugugugucguugcaggccuuauucaagcuuaccauggcccugagcaaggugaaacucaacgacacccugaauaaggaucagcuucuguccucuagcaaauacacaauccaaagauccacgggcgacucuauugauacccccaacuaugacguccagaagcacaucaauaaacucugcgggaugcugcuuauuacagaggaugcuaaccauaaguucaccggaguuaucggcaugcuguacgccaugagccggcucgggcgcgaagacacaauuaagauccugagagaugcgggauaucacgugaaagcuaauggcguggacgucaccacacaucggcaggauaucaacgggaaggagaugaaauuugaagugcugacccucgccucccugacgaccgagauucagaucaauauugaaaucgagucucgcaagagcuacaaaaagaugcuuaaggagaugggagaaguugccccugaguauagacacgacuccccggauuguggcaugauuauccugugcauugcugcccucgugaucacaaaacuggcugccggcgaccggagcgggcuuaccgcggucauccgcagagccaacaaugugcugaagaacgaaaugaaacgguacaagggacuccugcccaaagauauugcuaauucuuucuaugagguuuuugagaaguacccucauuucaucgacguguuuguccacuucggcauugcccaauccagcacacgcgggggaucuagaguggaaggcaucuuugcugggcuguucaugaacgccuacggagcgggccaggugaugcuccgguggggcguccuggccaaauccguuaagaauauuaugcuugggcacgcuagcgugcaggccgagauggaacagguggucgagguguaugaauacgcucaaaagcugggaggcgaggccggguuuuaucauauccucaacaaucccaaagccucucugcuuucccugacccaguucccucacuuuagcuccguugugcucggaaacgcugcgggccuggggaucaugggagaguaccgcggcacgcccagaaaccaggaccuguaugaugccgcuaaggccuacgccgaacagcucaaagagaauggcgucauuaacuauucugugcuggaccuuacagcugaggaacuggaagccaucaagcaucaacucaauccuaaagauaacgacguugagcugugaggacuaguacuggcugcaucucccuuuccucuguccuccauccuucucccaggauggugaagggggaccugguacccagugauccccaccccaggauccuaaaucaugacuuaccugcuaauaaaaacucauuggaaaagugagaagaucuaaaaaaaaaaaaaaaaaaaaaaaaaaaaaaaaaaaaaaaaaaaaaaaaaaaaaaaaaaaaaaaaugcaucccccccccccccccccccccccccccccccaaaggcucuuuucagagccaccagaauu

SEQ ID NO: 20452 - RNA, 1532 nt, Artificial Sequence
  mRNA product Design f-3 comprising derived and/or modified sequence from HRSV(Memphis-37)__AIY60635.1__N (opt6)
gggagagucccgcagucggcguccagcggcucugcuuguucgugugugugucguugcaggccuuauucaagcuuaccauggccuuaaguaaaguaaaauuaaacgacacacuaaacaaagaccaauuacucucaucaucgaaauauacaauacaaagauccacaggagacuccauagauacaccaaauuacgacguacaaaaacauauaaacaaacucugcggaauguuauuaauaacagaagacgcaaaccacaaauucacaggagucauagguaugcuauacgcaaugucaagauuaggaagagaagauacaauaaaaauacuaagagacgcaggauaccacguaaaagcaaacggaguagacguaacaacacauagacaagauauaaacgguaaagaaaugaaauucgaaguacuaacacuagccagucuaacaacagaaauacaaauaaacauagaaauagaaagccgaaaaucauacaaaaaaauguuaaaagaaaugggggaaguagcacccgaauacagacaugauucaccugacugcggaaugauaauacucugcauagcggcauuagucauaacaaaacuagccgcaggagacagaagcggauuaacagcaguaauaagaagagcaaauaauguauuaaaaaaugaaaugaaaagguauaaaggauuacuaccaaaagauauagcaaacucauucuaugaaguuuucgaaaaauacccacacuucauagacgucuucguacacuuuggaauagcacaaagcagcacaagaggaggaagcagaguagaaggaauauucgcaggacuauucaugaaugcauacggagccggacaaguaaugcuaagauggggaguuuuagcaaaaagcguaaaaaacauaauguuaggacacgccuccguccaagccgaaauggaacaaguaguagaaguauacgaauaugcacaaaaacuaggaggagaagcaggauucuaucacauacucaauaacccaaaagcaucacuauugagcuuaacacaauucccacauuuuucauccguaguccuaggaaaugcagcaggcuuaggaauaaugggagaauacagaggcacaccaagaaaucaagacuuauacgaugcagcaaaagcauacgcagaacaacuaaaagaaaacggaguaauaaacuacucaguauuagauuuaacagcagaagaauuagaagcaauaaaacaucaacuaaauccuaaggauaaugauguagaacucuaaggacuaguacuggcugcaucucccuuuccucuguccuccauccuucucccaggauggugaagggggaccugguacccagugauccccaccccaggauccuaaaucaugacuuaccugcuaauaaaaacucauuggaaaagugagaagaucuaaaaaaaaaaaaaaaaaaaaaaaaaaaaaaaaaaaaaaaaaaaaaaaaaaaaaaaaaaaaaaaaugcaucccccccccccccccccccccccccccccccaaaggcucuuuucagagccaccagaauu

SEQ ID NO: 20453 - RNA, 1532 nt, Artificial Sequence
  mRNA product Design f-3 comprising derived and/or modified sequence from HRSV(Memphis-37)__AIY60635.1__N (opt11)
gggagagucccgcagucggcguccagcggcucugcuuguucgugugugugucguugcaggccuuauucaagcuuaccauggcccuaagcaaagucaaacucaacgacacacuaaacaaagaccaacuccucagcuccagcaaauacaccauccaacgauccaccggcgacuccauagacacccccaacuacgacguccaaaaacacaucaacaaacuaugcggcaugcuccuaaucacagaagacgccaaccacaaauucaccggagucaucggcaugcucuacgccaugagccgccucggccgagaagacacaaucaaaauacuaagagacgccggcuaccacguaaaagccaacggcguagacguaaccacccaccgccaagacaucaacggcaaagaaaugaaauucgaaguucucacccucgccucacuaaccacggaaauccaaauaaacauugaaaucgaaagcagaaaauccuacaaaaagaugcuaaaagaaaugggcgagguagccccagaauaccgccacgacagccccgacugcggaaugaucauccucugcauugcagcccucgucaucaccaaacuagccgccggcgacagaagcggccuaaccgcaguaauccgccgagccaacaacguacucaaaaacgaaaugaaacgcuacaaaggccuccuccccaaagacaucgccaacagcuucuacgaaguauucgaaaaauacccgcacuucaucgacgucuucguacacuucggcauagcccaaagcagcacacgaggcggcucccgcgucgaaggaauauucgccggccuguucaugaacgcauacggagcgggccaagucaugcuccgcugggguguacuagccaaguccgucaaaaacaucaugcuagggcacgcaagcguacaagccgaaauggaacaaguagucgaagucuacgaauacgcacaaaaacuaggcggcgaagccggcuucuaccacauccuaaacaaccccaaagccucauuacucucccucacccaauuuccucacuucuccagcgucguccucggaaacgccgccggccuaggcauaaugggggaauaccgcggcaccccgcgcaaccaagaccucuacgacgcagcaaaagccuacgcagaacaacuaaaagaaaacggagucaucaacuacagcguacuggaccuaaccgccgaagaacucgaagccauaaaacaccaacucaaccccaaagacaacgacgucgagcucuaaggacuaguacuggcugcaucucccuuuccucuguccuccauccuucucccaggauggugaagggggaccugguacccagugauccccaccccaggauccuaaaucaugacuuaccugcuaauaaaaacucauuggaaaagugagaagaucuaaaaaaaaaaaaaaaaaaaaaaaaaaaaaaaaaaaaaaaaaaaaaaaaaaaaaaaaaaaaaaaaugcaucccccccccccccccccccccccccccccccaaaggcucuuuucagagccaccagaauu

SEQ ID NO: 20454 - RNA, 1748 nt, Artificial Sequence
  mRNA product Design f-4 comprising derived and/or modified sequence from HRSV(Memphis-37)__AIY60635.1__N (wt)
gggagagucccgcagucggcguccagcggcucugcuuguucgugugugugucguugcaggccuuauucaagcuuaccauggcucuuagcaaagucaaguugaacgauacacucaacaaagaucaacuucugucauccagcaaauacaccauccaacggagcacaggagauaguauugauacuccuaauuaugaugugcagaaacacaucaacaaguuauguggcauguuauuaaucacagaagaugcuaaucauaaauucacugggguaauagguauguuauaugcuaugucuagauuaggaagagaagacaccauaaaaauacucagagaugcgggauaucauguaaaagcaaauggaguggauguaacaacacaucgucaagacauuaauggaaaagaaaugaaauuugaaguguuaacauuggcaagcuuaacaacugaaauucaaaucaacauugagauagaaucuaggaaauccuacaaaaaaaugcuaaaagaaaugggagagguggcuccagaauacaggcaugacucuccugauuguggaaugauaauauuauguauagcagcauuaguaauaaccaaauuagcagcaggggauagaucuggucuuacugcugugauuaggagagcuaauaauguucuaaaaaaugaaaugaaacguuauaaaggcuuacuaccaaaggauauagccaacagcuucuaugaaguguuugaaaaauauccucacuuuauagauguuuuuguucauuuugguauagcacaaucuucuaccagagguggcaguagaguugaagggauuuuugcaggauuguuuaugaaugccuauggugcagggcaagugauguuacgguggggagucuuagcaaaaucaguuaaaaauauuaugcuaggacaugcuagugugcaagcagaaauggaacaaguuguggaaguuuaugaauaugcccaaaaauuggguggagaagcaggauucuaccauauauugaacaauccaaaagcaucauuauuaucuuugacucaauuuccccacuucuccaguguaguauugggcaaugcugcuggccuaggcauaaugggagaauacagagguacaccaaggaaucaagaucuauaugaugcugcaaaggcauaugcugaacaacucaaagaaaauggugugauuaacuacaguguauuagacuugacagcagaagaacuagaggcuaucaaacaucagcuuaauccaaaagauaaugauguagagcuuugaggacuagugaagggaacacccaaauuuaauucagccuuaagcacaauuaauuaagagugaaacguaauuguacaagcaguuggucacccaccauagggcaugaucaacaccgcaaccuuuccuuuuucccccagugauucugaaaaaccccucuucccuucagcuugcuuagauguuccaaauuuaguaagcuuaaggcggccuacagaagaaaaagaaaaaaaaggccacaaaaguucccucucacuuucaguaaauaaaauaaaagcagcaacagaaauaaagaaauaaaugaaauucaaaaugaaauaaauauuguguugugcagcauuaaaaaaucaauaaaaauuaaaaaugagcaagaucuaaaaaaaaaaaaaaaaaaaaaaaaaaaaaaaaaaaaaaaaaaaaaaaaaaaaaaaaaaaaaaaaugcaucccccccccccccccccccccccccccccccaaaggcucuuuucagagccaccagaauu

SEQ ID NO: 20455 - RNA, 1748 nt, Artificial Sequence
  mRNA product Design f-4 comprising derived and/or modified sequence from HRSV(Memphis-37)__AIY60635.1__N (opt1)
gggagagucccgcagucggcguccagcggcucugcuuguucgugugugugucguugcaggccuuauucaagcuuaccauggcccugagcaaggugaagcucaacgacacccugaacaaggaccagcugcucuccagcuccaaguacaccauccagcgcagcaccggcgacuccaucgacacccccaacuacgacguccagaagcacaucaacaagcugugcgggaugcugcucaucaccgaggacgccaaccacaaguucaccggcgugaucgggaugcuguacgcgaugagccggcugggccgcgaggacacgaucaagauccuccgggacgccggguaccacgugaaggccaacggcgucgacgugaccacccaccgccaggacaucaacggcaaggagaugaaguucgaggugcugacccuggccucccucacgaccgagauccagaucaacaucgagaucgagagccggaaguccuacaagaagaugcugaaggagaugggggaggucgccccggaguaccgccacgacagccccgacugcggcaugaucauccugugcaucgcggcccucgugaucaccaagcuggccgccggggaccgguccggccugaccgcggugauccgccgggccaacaacguccucaagaacgagaugaagcgcuacaaggggcugcugcccaaggacaucgccaacagcuucuacgagguguucgagaaguacccccacuucaucgacguguucguccacuucggcaucgcccaguccagcacgcggggcgggucccgcguggagggcaucuucgccgggcuguucaugaacgcguacggcgccggccaggugaugcugcgguggggcguccuggccaagagcgugaagaacaucaugcucgggcacgccuccgugcaggccgagauggagcaggucguggagguguacgaguacgcgcagaagcucgggggcgaggccggguucuaccacauccugaacaacccgaaggccagccuccugucccugacccaguucccccacuucagcagcgucgugcucggcaacgccgccggccuggggaucaugggcgaguaccgcgggacgccccggaaccaggaccuguacgacgcggccaaggccuacgccgagcagcucaaggagaacggcgugaucaacuacuccguccuggaccugaccgccgaggagcucgaggcgaucaagcaccagcugaaccccaaggacaacgacguggagcugugaggacuagugaagggaacacccaaauuuaauucagccuuaagcacaauuaauuaagagugaaacguaauuguacaagcaguuggucacccaccauagggcaugaucaacaccgcaaccuuuccuuuuucccccagugauucugaaaaaccccucuucccuucagcuugcuuagauguuccaaauuuaguaagcuuaaggcggccuacagaagaaaaagaaaaaaaaggccacaaaaguucccucucacuuucaguaaauaaaauaaaagcagcaacagaaauaaagaaauaaaugaaauucaaaaugaaauaaauauuguguugugcagcauuaaaaaaucaauaaaaauuaaaaaugagcaagaucuaaaaaaaaaaaaaaaaaaaaaaaaaaaaaaaaaaaaaaaaaaaaaaaaaaaaaaaaaaaaaaaaugcaucccccccccccccccccccccccccccccccaaaggcucuuuucagagccaccagaauu

SEQ ID NO: 20456 - RNA, 1748 nt, Artificial Sequence
  mRNA product Design f-4 comprising derived and/or modified sequence from HRSV(Memphis-37)__AIY60635.1__N (opt2)
gggagagucccgcagucggcguccagcggcucugcuuguucgugugugugucguugcaggccuuauucaagcuuaccauggcccucuccaaggucaagcucaacgacacccucaacaaggaccagcuccucuccuccuccaaguacaccauccagcgcuccaccggcgacuccaucgacacccccaacuacgacguccagaagcacaucaacaagcucugcggcaugcuccucaucaccgaggacgccaaccacaaguucaccggcgucaucggcaugcucuacgccaugucccgccucggccgcgaggacaccaucaagauccuccgcgacgccggcuaccacgucaaggccaacggcgucgacgucaccacccaccgccaggacaucaacggcaaggagaugaaguucgagguccucacccucgccucccucaccaccgagauccagaucaacaucgagaucgagucccgcaaguccuacaagaagaugcucaaggagaugggcgaggucgcccccgaguaccgccacgacucccccgacugcggcaugaucauccucugcaucgccgcccucgucaucaccaagcucgccgccggcgaccgcuccggccucaccgccgucauccgccgcgccaacaacguccucaagaacgagaugaagcgcuacaagggccuccuccccaaggacaucgccaacuccuucuacgaggucuucgagaaguacccccacuucaucgacgucuucguccacuucggcaucgcccaguccuccacccgcggcggcucccgcgucgagggcaucuucgccggccucuucaugaacgccuacggcgccggccaggucaugcuccgcuggggcguccucgccaaguccgucaagaacaucaugcucggccacgccuccguccaggccgagauggagcaggucgucgaggucuacgaguacgcccagaagcucggcggcgaggccggcuucuaccacauccucaacaaccccaaggccucccuccucucccucacccaguucccccacuucuccuccgucguccucggcaacgccgccggccucggcaucaugggcgaguaccgcggcaccccccgcaaccaggaccucuacgacgccgccaaggccuacgccgagcagcucaaggagaacggcgucaucaacuacuccguccucgaccucaccgccgaggagcucgaggccaucaagcaccagcucaaccccaaggacaacgacgucgagcucugaggacuagugaagggaacacccaaauuuaauucagccuuaagcacaauuaauuaagagugaaacguaauuguacaagcaguuggucacccaccauagggcaugaucaacaccgcaaccuuuccuuuuucccccagugauucugaaaaaccccucuucccuucagcuugcuuagauguuccaaauuuaguaagcuuaaggcggccuacagaagaaaaagaaaaaaaaggccacaaaaguucccucucacuuucaguaaauaaaauaaaagcagcaacagaaauaaagaaauaaaugaaauucaaaaugaaauaaauauuguguugugcagcauuaaaaaaucaauaaaaauuaaaaaugagcaagaucuaaaaaaaaaaaaaaaaaaaaaaaaaaaaaaaaaaaaaaaaaaaaaaaaaaaaaaaaaaaaaaaaugcaucccccccccccccccccccccccccccccccaaaggcucuuuucagagccaccagaauu

SEQ ID NO: 20457 - RNA, 1748 nt, Artificial Sequence
  mRNA product Design f-4 comprising derived and/or modified sequence from HRSV(Memphis-37)__AIY60635.1__N (opt3)
gggagagucccgcagucggcguccagcggcucugcuuguucgugugugugucguugcaggccuuauucaagcuuaccauggcccugagcaaggugaaacucaacgacacccuuaauaaggaucagcuguuguccucuucaaaauacacaauccaaagaaguacuggcgacagcauugauacgcccaacuaugacguccagaagcacauaaauaaauuaugcgggaugcugcuaaucaccgaggaugcuaaccauaaguucacaggaguuauugguaugcucuacgcaauguccaggcugggccgggaagacacuaucaagauucuucgcgaugccggguaucacgugaaagcgaauggaguagacgugaccacacaucgacaggauaucaacggcaaggagaugaaauuugaaguccugaccuuggcuucucucacuacagagauacagaucaauauugaaaucgagucgcguaagucauacaaaaagaugcugaaggagaugggugaaguggccccugaguauagacacgacagcccagauugugggaugauuauccugugcauagcagcccucguuauuaccaaauuagcugcaggagacaggaguggccugacggccgugauccggcgcgcuaacaauguccuuaagaacgaaaugaaaagauacaagggcuugcugccgaaagauauugccaauuccuucuaugagguguuugagaaguacccccauuucaucgacguauuuguucacuucgggaucgcgcaaucuagcacuaggggagguucccggguggaaggcauuuuugcagggcuauucaugaacgccuacggagcuggccaggucaugcuccgcuggggugugcuggccaaaucagugaagaauauaaugcuugggcacgcaaguguccaggcugagauggaacagguuguggagguauaugaauacgcccaaaagcugggaggcgaggcgggcuuuuaucauaucuugaacaauccuaaagccagccuccugucuuuaacccaguucccacacuuuuccucagugguccuggggaacgcagcuggacucgguauuaugggcgaguaccgagggacacccagaaaccaggaccuuuaugaugccgcuaaggccuacgcagaacagcugaaagagaauggagugaucaacuauagcguuuuggaccuaacugccgaggaacuggaagcuauaaagcaucaacucaauccuaaagauaacgacguggagcugugaggacuagugaagggaacacccaaauuuaauucagccuuaagcacaauuaauuaagagugaaacguaauuguacaagcaguuggucacccaccauagggcaugaucaacaccgcaaccuuuccuuuuucccccagugauucugaaaaaccccucuucccuucagcuugcuuagauguuccaaauuuaguaagcuuaaggcggccuacagaagaaaaagaaaaaaaaggccacaaaaguucccucucacuuucaguaaauaaaauaaaagcagcaacagaaauaaagaaauaaaugaaauucaaaaugaaauaaauauuguguugugcagcauuaaaaaaucaauaaaaauuaaaaaugagcaagaucuaaaaaaaaaaaaaaaaaaaaaaaaaaaaaaaaaaaaaaaaaaaaaaaaaaaaaaaaaaaaaaaaugcaucccccccccccccccccccccccccccccccaaaggcucuuuucagagccaccagaauu

SEQ ID NO: 20458 - RNA, 1748 nt, Artificial Sequence
  mRNA product Design f-4 comprising derived and/or modified sequence from HRSV(Memphis-37)__AIY60635.1__N (opt4)
gggagagucccgcagucggcguccagcggcucugcuuguucgugugugugucguugcaggccuuauucaagcuuaccauggcccugagcaaggugaagcugaacgacacccugaacaaggaccagcugcugagcagcagcaaguacaccauccagagaagcaccggcgacagcaucgacacccccaacuacgacgugcagaagcacaucaacaagcugugcggcaugcugcugaucaccgaggacgccaaccacaaguucaccggcgugaucggcaugcuguacgccaugagcagacugggcagagaggacaccaucaagauccugagagacgccggcuaccacgugaaggccaacggcguggacgugaccacccacagacaggacaucaacggcaaggagaugaaguucgaggugcugacccuggccagccugaccaccgagauccagaucaacaucgagaucgagagcagaaagagcuacaagaagaugcugaaggagaugggcgagguggcccccgaguacagacacgacagccccgacugcggcaugaucauccugugcaucgccgcccuggugaucaccaagcuggccgccggcgacagaagcggccugaccgccgugaucagaagagccaacaacgugcugaagaacgagaugaagagauacaagggccugcugcccaaggacaucgccaacagcuucuacgagguguucgagaaguacccccacuucaucgacguguucgugcacuucggcaucgcccagagcagcaccagaggcggcagcagaguggagggcaucuucgccggccuguucaugaacgccuacggcgccggccaggugaugcugagauggggcgugcuggccaagagcgugaagaacaucaugcugggccacgccagcgugcaggccgagauggagcaggugguggagguguacgaguacgcccagaagcugggcggcgaggccggcuucuaccacauccugaacaaccccaaggccagccugcugagccugacccaguucccccacuucagcagcguggugcugggcaacgccgccggccugggcaucaugggcgaguacagaggcacccccagaaaccaggaccuguacgacgccgccaaggccuacgccgagcagcugaaggagaacggcgugaucaacuacagcgugcuggaccugaccgccgaggagcuggaggccaucaagcaccagcugaaccccaaggacaacgacguggagcugugaggacuagugaagggaacacccaaauuuaauucagccuuaagcacaauuaauuaagagugaaacguaauuguacaagcaguuggucacccaccauagggcaugaucaacaccgcaaccuuuccuuuuucccccagugauucugaaaaaccccucuucccuucagcuugcuuagauguuccaaauuuaguaagcuuaaggcggccuacagaagaaaaagaaaaaaaaggccacaaaaguucccucucacuuucaguaaauaaaauaaaagcagcaacagaaauaaagaaauaaaugaaauucaaaaugaaauaaauauuguguugugcagcauuaaaaaaucaauaaaaauuaaaaaugagcaagaucuaaaaaaaaaaaaaaaaaaaaaaaaaaaaaaaaaaaaaaaaaaaaaaaaaaaaaaaaaaaaaaaaugcaucccccccccccccccccccccccccccccccaaaggcucuuuucagagccaccagaauu

SEQ ID NO: 20459 - RNA, 1748 nt, Artificial Sequence
  mRNA product Design f-4 comprising derived and/or modified sequence from HRSV(Memphis-37)__AIY60635.1__N (opt5)
gggagagucccgcagucggcguccagcggcucugcuuguucgugugugugucguugcaggccuuauucaagcuuaccauggcccugagcaaggugaaacucaacgacacccugaauaaggaucagcuucuguccucuagcaaauacacaauccaaagauccacgggcgacucuauugauacccccaacuaugacguccagaagcacaucaauaaacucugcgggaugcugcuuauuacagaggaugcuaaccauaaguucaccggaguuaucggcaugcuguacgccaugagccggcucgggcgcgaagacacaauuaagauccugagagaugcgggauaucacgugaaagcuaauggcguggacgucaccacacaucggcaggauaucaacgggaaggagaugaaauuugaagugcugacccucgccucccugacgaccgagauucagaucaauauugaaaucgagucucgcaagagcuacaaaaagaugcuuaaggagaugggagaaguugccccugaguauagacacgacuccccggauuguggcaugauuauccugugcauugcugcccucgugaucacaaaacuggcugccggcgaccggagcgggcuuaccgcggucauccgcagagccaacaaugugcugaagaacgaaaugaaacgguacaagggacuccugcccaaagauauugcuaauucuuucuaugagguuuuugagaaguacccucauuucaucgacguguuuguccacuucggcauugcccaauccagcacacgcgggggaucuagaguggaaggcaucuuugcugggcuguucaugaacgccuacggagcgggccaggugaugcuccgguggggcguccuggccaaauccguuaagaauauuaugcuugggcacgcuagcgugcaggccgagauggaacagguggucgagguguaugaauacgcucaaaagcugggaggcgaggccggguuuuaucauauccucaacaaucccaaagccucucugcuuucccugacccaguucccucacuuuagcuccguugugcucggaaacgcugcgggccuggggaucaugggagaguaccgcggcacgcccagaaaccaggaccuguaugaugccgcuaaggccuacgccgaacagcucaaagagaauggcgucauuaacuauucugugcuggaccuuacagcugaggaacuggaagccaucaagcaucaacucaauccuaaagauaacgacguugagcugugaggacuagugaagggaacacccaaauuuaauucagccuuaagcacaauuaauuaagagugaaacguaauuguacaagcaguuggucacccaccauagggcaugaucaacaccgcaaccuuuccuuuuucccccagugauucugaaaaaccccucuucccuucagcuugcuuagauguuccaaauuuaguaagcuuaaggcggccuacagaagaaaaagaaaaaaaaggccacaaaaguucccucucacuuucaguaaauaaaauaaaagcagcaacagaaauaaagaaauaaaugaaauucaaaaugaaauaaauauuguguugugcagcauuaaaaaaucaauaaaaauuaaaaaugagcaagaucuaaaaaaaaaaaaaaaaaaaaaaaaaaaaaaaaaaaaaaaaaaaaaaaaaaaaaaaaaaaaaaaaugcaucccccccccccccccccccccccccccccccaaaggcucuuuucagagccaccagaauu

SEQ ID NO: 20460 - RNA, 1748 nt, Artificial Sequence
  mRNA product Design f-4 comprising derived and/or modified sequence from HRSV(Memphis-37)__AIY60635.1__N (opt6)
gggagagucccgcagucggcguccagcggcucugcuuguucgugugugugucguugcaggccuuauucaagcuuaccauggccuuaaguaaaguaaaauuaaacgacacacuaaacaaagaccaauuacucucaucaucgaaauauacaauacaaagauccacaggagacuccauagauacaccaaauuacgacguacaaaaacauauaaacaaacucugcggaauguuauuaauaacagaagacgcaaaccacaaauucacaggagucauagguaugcuauacgcaaugucaagauuaggaagagaagauacaauaaaaauacuaagagacgcaggauaccacguaaaagcaaacggaguagacguaacaacacauagacaagauauaaacgguaaagaaaugaaauucgaaguacuaacacuagccagucuaacaacagaaauacaaauaaacauagaaauagaaagccgaaaaucauacaaaaaaauguuaaaagaaaugggggaaguagcacccgaauacagacaugauucaccugacugcggaaugauaauacucugcauagcggcauuagucauaacaaaacuagccgcaggagacagaagcggauuaacagcaguaauaagaagagcaaauaauguauuaaaaaaugaaaugaaaagguauaaaggauuacuaccaaaagauauagcaaacucauucuaugaaguuuucgaaaaauacccacacuucauagacgucuucguacacuuuggaauagcacaaagcagcacaagaggaggaagcagaguagaaggaauauucgcaggacuauucaugaaugcauacggagccggacaaguaaugcuaagauggggaguuuuagcaaaaagcguaaaaaacauaauguuaggacacgccuccguccaagccgaaauggaacaaguaguagaaguauacgaauaugcacaaaaacuaggaggagaagcaggauucuaucacauacucaauaacccaaaagcaucacuauugagcuuaacacaauucccacauuuuucauccguaguccuaggaaaugcagcaggcuuaggaauaaugggagaauacagaggcacaccaagaaaucaagacuuauacgaugcagcaaaagcauacgcagaacaacuaaaagaaaacggaguaauaaacuacucaguauuagauuuaacagcagaagaauuagaagcaauaaaacaucaacuaaauccuaaggauaaugauguagaacucuaaggacuagugaagggaacacccaaauuuaauucagccuuaagcacaauuaauuaagagugaaacguaauuguacaagcaguuggucacccaccauagggcaugaucaacaccgcaaccuuuccuuuuucccccagugauucugaaaaaccccucuucccuucagcuugcuuagauguuccaaauuuaguaagcuuaaggcggccuacagaagaaaaagaaaaaaaaggccacaaaaguucccucucacuuucaguaaauaaaauaaaagcagcaacagaaauaaagaaauaaaugaaauucaaaaugaaauaaauauuguguugugcagcauuaaaaaaucaauaaaaauuaaaaaugagcaagaucuaaaaaaaaaaaaaaaaaaaaaaaaaaaaaaaaaaaaaaaaaaaaaaaaaaaaaaaaaaaaaaaaugcaucccccccccccccccccccccccccccccccaaaggcucuuuucagagccaccagaauu

SEQ ID NO: 20461 - RNA, 1748 nt, Artificial Sequence
  mRNA product Design f-4 comprising derived and/or modified sequence from HRSV(Memphis-37)__AIY60635.1__N (opt11)
gggagagucccgcagucggcguccagcggcucugcuuguucgugugugugucguugcaggccuuauucaagcuuaccauggcccuaagcaaagucaaacucaacgacacacuaaacaaagaccaacuccucagcuccagcaaauacaccauccaacgauccaccggcgacuccauagacacccccaacuacgacguccaaaaacacaucaacaaacuaugcggcaugcuccuaaucacagaagacgccaaccacaaauucaccggagucaucggcaugcucuacgccaugagccgccucggccgagaagacacaaucaaaauacuaagagacgccggcuaccacguaaaagccaacggcguagacguaaccacccaccgccaagacaucaacggcaaagaaaugaaauucgaaguucucacccucgccucacuaaccacggaaauccaaauaaacauugaaaucgaaagcagaaaauccuacaaaaagaugcuaaaagaaaugggcgagguagccccagaauaccgccacgacagccccgacugcggaaugaucauccucugcauugcagcccucgucaucaccaaacuagccgccggcgacagaagcggccuaaccgcaguaauccgccgagccaacaacguacucaaaaacgaaaugaaacgcuacaaaggccuccuccccaaagacaucgccaacagcuucuacgaaguauucgaaaaauacccgcacuucaucgacgucuucguacacuucggcauagcccaaagcagcacacgaggcggcucccgcgucgaaggaauauucgccggccuguucaugaacgcauacggagcgggccaagucaugcuccgcugggguguacuagccaaguccgucaaaaacaucaugcuagggcacgcaagcguacaagccgaaauggaacaaguagucgaagucuacgaauacgcacaaaaacuaggcggcgaagccggcuucuaccacauccuaaacaaccccaaagccucauuacucucccucacccaauuuccucacuucuccagcgucguccucggaaacgccgccggccuaggcauaaugggggaauaccgcggcaccccgcgcaaccaagaccucuacgacgcagcaaaagccuacgcagaacaacuaaaagaaaacggagucaucaacuacagcguacuggaccuaaccgccgaagaacucgaagccauaaaacaccaacucaaccccaaagacaacgacgucgagcucuaaggacuagugaagggaacacccaaauuuaauucagccuuaagcacaauuaauuaagagugaaacguaauuguacaagcaguuggucacccaccauagggcaugaucaacaccgcaaccuuuccuuuuucccccagugauucugaaaaaccccucuucccuucagcuugcuuagauguuccaaauuuaguaagcuuaaggcggccuacagaagaaaaagaaaaaaaaggccacaaaaguucccucucacuuucaguaaauaaaauaaaagcagcaacagaaauaaagaaauaaaugaaauucaaaaugaaauaaauauuguguugugcagcauuaaaaaaucaauaaaaauuaaaaaugagcaagaucuaaaaaaaaaaaaaaaaaaaaaaaaaaaaaaaaaaaaaaaaaaaaaaaaaaaaaaaaaaaaaaaaugcaucccccccccccccccccccccccccccccccaaaggcucuuuucagagccaccagaauu

SEQ ID NO: 20462 - RNA, 1524 nt, Artificial Sequence
  mRNA product Design f-5 comprising derived and/or modified sequence from HRSV(Memphis-37)__AIY60635.1__N (wt)
gggagacuuucccauucuguagcagaauuugguguugccuguggucuuggucccgcggagaagcuuaccauggcucuuagcaaagucaaguugaacgauacacucaacaaagaucaacuucugucauccagcaaauacaccauccaacggagcacaggagauaguauugauacuccuaauuaugaugugcagaaacacaucaacaaguuauguggcauguuauuaaucacagaagaugcuaaucauaaauucacugggguaauagguauguuauaugcuaugucuagauuaggaagagaagacaccauaaaaauacucagagaugcgggauaucauguaaaagcaaauggaguggauguaacaacacaucgucaagacauuaauggaaaagaaaugaaauuugaaguguuaacauuggcaagcuuaacaacugaaauucaaaucaacauugagauagaaucuaggaaauccuacaaaaaaaugcuaaaagaaaugggagagguggcuccagaauacaggcaugacucuccugauuguggaaugauaauauuauguauagcagcauuaguaauaaccaaauuagcagcaggggauagaucuggucuuacugcugugauuaggagagcuaauaauguucuaaaaaaugaaaugaaacguuauaaaggcuuacuaccaaaggauauagccaacagcuucuaugaaguguuugaaaaauauccucacuuuauagauguuuuuguucauuuugguauagcacaaucuucuaccagagguggcaguagaguugaagggauuuuugcaggauuguuuaugaaugccuauggugcagggcaagugauguuacgguggggagucuuagcaaaaucaguuaaaaauauuaugcuaggacaugcuagugugcaagcagaaauggaacaaguuguggaaguuuaugaauaugcccaaaaauuggguggagaagcaggauucuaccauauauugaacaauccaaaagcaucauuauuaucuuugacucaauuuccccacuucuccaguguaguauugggcaaugcugcuggccuaggcauaaugggagaauacagagguacaccaaggaaucaagaucuauaugaugcugcaaaggcauaugcugaacaacucaaagaaaauggugugauuaacuacaguguauuagacuugacagcagaagaacuagaggcuaucaaacaucagcuuaauccaaaagauaaugauguagagcuuugaggacuaguacuggcugcaucucccuuuccucuguccuccauccuucucccaggauggugaagggggaccugguacccagugauccccaccccaggauccuaaaucaugacuuaccugcuaauaaaaacucauuggaaaagugagaagaucuaaaaaaaaaaaaaaaaaaaaaaaaaaaaaaaaaaaaaaaaaaaaaaaaaaaaaaaaaaaaaaaaugcaucccccccccccccccccccccccccccccccaaaggcucuuuucagagccaccagaauu

SEQ ID NO: 20463 - RNA, 1524 nt, Artificial Sequence
  mRNA product Design f-5 comprising derived and/or modified sequence from HRSV(Memphis-37)__AIY60635.1__N (opt1)
gggagacuuucccauucuguagcagaauuugguguugccuguggucuuggucccgcggagaagcuuaccauggcccugagcaaggugaagcucaacgacacccugaacaaggaccagcugcucuccagcuccaaguacaccauccagcgcagcaccggcgacuccaucgacacccccaacuacgacguccagaagcacaucaacaagcugugcgggaugcugcucaucaccgaggacgccaaccacaaguucaccggcgugaucgggaugcuguacgcgaugagccggcugggccgcgaggacacgaucaagauccuccgggacgccggguaccacgugaaggccaacggcgucgacgugaccacccaccgccaggacaucaacggcaaggagaugaaguucgaggugcugacccuggccucccucacgaccgagauccagaucaacaucgagaucgagagccggaaguccuacaagaagaugcugaaggagaugggggaggucgccccggaguaccgccacgacagccccgacugcggcaugaucauccugugcaucgcggcccucgugaucaccaagcuggccgccggggaccgguccggccugaccgcggugauccgccgggccaacaacguccucaagaacgagaugaagcgcuacaaggggcugcugcccaaggacaucgccaacagcuucuacgagguguucgagaaguacccccacuucaucgacguguucguccacuucggcaucgcccaguccagcacgcggggcgggucccgcguggagggcaucuucgccgggcuguucaugaacgcguacggcgccggccaggugaugcugcgguggggcguccuggccaagagcgugaagaacaucaugcucgggcacgccuccgugcaggccgagauggagcaggucguggagguguacgaguacgcgcagaagcucgggggcgaggccggguucuaccacauccugaacaacccgaaggccagccuccugucccugacccaguucccccacuucagcagcgucgugcucggcaacgccgccggccuggggaucaugggcgaguaccgcgggacgccccggaaccaggaccuguacgacgcggccaaggccuacgccgagcagcucaaggagaacggcgugaucaacuacuccguccuggaccugaccgccgaggagcucgaggcgaucaagcaccagcugaaccccaaggacaacgacguggagcugugaggacuaguacuggcugcaucucccuuuccucuguccuccauccuucucccaggauggugaagggggaccugguacccagugauccccaccccaggauccuaaaucaugacuuaccugcuaauaaaaacucauuggaaaagugagaagaucuaaaaaaaaaaaaaaaaaaaaaaaaaaaaaaaaaaaaaaaaaaaaaaaaaaaaaaaaaaaaaaaaugcaucccccccccccccccccccccccccccccccaaaggcucuuuucagagccaccagaauu

SEQ ID NO: 20464 - RNA, 1524 nt, Artificial Sequence
  mRNA product Design f-5 comprising derived and/or modified sequence from HRSV(Memphis-37)__AIY60635.1__N (opt2)
gggagacuuucccauucuguagcagaauuugguguugccuguggucuuggucccgcggagaagcuuaccauggcccucuccaaggucaagcucaacgacacccucaacaaggaccagcuccucuccuccuccaaguacaccauccagcgcuccaccggcgacuccaucgacacccccaacuacgacguccagaagcacaucaacaagcucugcggcaugcuccucaucaccgaggacgccaaccacaaguucaccggcgucaucggcaugcucuacgccaugucccgccucggccgcgaggacaccaucaagauccuccgcgacgccggcuaccacgucaaggccaacggcgucgacgucaccacccaccgccaggacaucaacggcaaggagaugaaguucgagguccucacccucgccucccucaccaccgagauccagaucaacaucgagaucgagucccgcaaguccuacaagaagaugcucaaggagaugggcgaggucgcccccgaguaccgccacgacucccccgacugcggcaugaucauccucugcaucgccgcccucgucaucaccaagcucgccgccggcgaccgcuccggccucaccgccgucauccgccgcgccaacaacguccucaagaacgagaugaagcgcuacaagggccuccuccccaaggacaucgccaacuccuucuacgaggucuucgagaaguacccccacuucaucgacgucuucguccacuucggcaucgcccaguccuccacccgcggcggcucccgcgucgagggcaucuucgccggccucuucaugaacgccuacggcgccggccaggucaugcuccgcuggggcguccucgccaaguccgucaagaacaucaugcucggccacgccuccguccaggccgagauggagcaggucgucgaggucuacgaguacgcccagaagcucggcggcgaggccggcuucuaccacauccucaacaaccccaaggccucccuccucucccucacccaguucccccacuucuccuccgucguccucggcaacgccgccggccucggcaucaugggcgaguaccgcggcaccccccgcaaccaggaccucuacgacgccgccaaggccuacgccgagcagcucaaggagaacggcgucaucaacuacuccguccucgaccucaccgccgaggagcucgaggccaucaagcaccagcucaaccccaaggacaacgacgucgagcucugaggacuaguacuggcugcaucucccuuuccucuguccuccauccuucucccaggauggugaagggggaccugguacccagugauccccaccccaggauccuaaaucaugacuuaccugcuaauaaaaacucauuggaaaagugagaagaucuaaaaaaaaaaaaaaaaaaaaaaaaaaaaaaaaaaaaaaaaaaaaaaaaaaaaaaaaaaaaaaaaugcaucccccccccccccccccccccccccccccccaaaggcucuuuucagagccaccagaauu

SEQ ID NO: 20465 - RNA, 1524 nt, Artificial Sequence
  mRNA product Design f-5 comprising derived and/or modified sequence from HRSV(Memphis-37)__AIY60635.1__N (opt3)
gggagacuuucccauucuguagcagaauuugguguugccuguggucuuggucccgcggagaagcuuaccauggcccugagcaaggugaaacucaacgacacccuuaauaaggaucagcuguuguccucuucaaaauacacaauccaaagaaguacuggcgacagcauugauacgcccaacuaugacguccagaagcacauaaauaaauuaugcgggaugcugcuaaucaccgaggaugcuaaccauaaguucacaggaguuauugguaugcucuacgcaauguccaggcugggccgggaagacacuaucaagauucuucgcgaugccggguaucacgugaaagcgaauggaguagacgugaccacacaucgacaggauaucaacggcaaggagaugaaauuugaaguccugaccuuggcuucucucacuacagagauacagaucaauauugaaaucgagucgcguaagucauacaaaaagaugcugaaggagaugggugaaguggccccugaguauagacacgacagcccagauugugggaugauuauccugugcauagcagcccucguuauuaccaaauuagcugcaggagacaggaguggccugacggccgugauccggcgcgcuaacaauguccuuaagaacgaaaugaaaagauacaagggcuugcugccgaaagauauugccaauuccuucuaugagguguuugagaaguacccccauuucaucgacguauuuguucacuucgggaucgcgcaaucuagcacuaggggagguucccggguggaaggcauuuuugcagggcuauucaugaacgccuacggagcuggccaggucaugcuccgcuggggugugcuggccaaaucagugaagaauauaaugcuugggcacgcaaguguccaggcugagauggaacagguuguggagguauaugaauacgcccaaaagcugggaggcgaggcgggcuuuuaucauaucuugaacaauccuaaagccagccuccugucuuuaacccaguucccacacuuuuccucagugguccuggggaacgcagcuggacucgguauuaugggcgaguaccgagggacacccagaaaccaggaccuuuaugaugccgcuaaggccuacgcagaacagcugaaagagaauggagugaucaacuauagcguuuuggaccuaacugccgaggaacuggaagcuauaaagcaucaacucaauccuaaagauaacgacguggagcugugaggacuaguacuggcugcaucucccuuuccucuguccuccauccuucucccaggauggugaagggggaccugguacccagugauccccaccccaggauccuaaaucaugacuuaccugcuaauaaaaacucauuggaaaagugagaagaucuaaaaaaaaaaaaaaaaaaaaaaaaaaaaaaaaaaaaaaaaaaaaaaaaaaaaaaaaaaaaaaaaugcaucccccccccccccccccccccccccccccccaaaggcucuuuucagagccaccagaauu

SEQ ID NO: 20466 - RNA, 1524 nt, Artificial Sequence
  mRNA product Design f-5 comprising derived and/or modified sequence from HRSV(Memphis-37)__AIY60635.1__N (opt4)
gggagacuuucccauucuguagcagaauuugguguugccuguggucuuggucccgcggagaagcuuaccauggcccugagcaaggugaagcugaacgacacccugaacaaggaccagcugcugagcagcagcaaguacaccauccagagaagcaccggcgacagcaucgacacccccaacuacgacgugcagaagcacaucaacaagcugugcggcaugcugcugaucaccgaggacgccaaccacaaguucaccggcgugaucggcaugcuguacgccaugagcagacugggcagagaggacaccaucaagauccugagagacgccggcuaccacgugaaggccaacggcguggacgugaccacccacagacaggacaucaacggcaaggagaugaaguucgaggugcugacccuggccagccugaccaccgagauccagaucaacaucgagaucgagagcagaaagagcuacaagaagaugcugaaggagaugggcgagguggcccccgaguacagacacgacagccccgacugcggcaugaucauccugugcaucgccgcccuggugaucaccaagcuggccgccggcgacagaagcggccugaccgccgugaucagaagagccaacaacgugcugaagaacgagaugaagagauacaagggccugcugcccaaggacaucgccaacagcuucuacgagguguucgagaaguacccccacuucaucgacguguucgugcacuucggcaucgcccagagcagcaccagaggcggcagcagaguggagggcaucuucgccggccuguucaugaacgccuacggcgccggccaggugaugcugagauggggcgugcuggccaagagcgugaagaacaucaugcugggccacgccagcgugcaggccgagauggagcaggugguggagguguacgaguacgcccagaagcugggcggcgaggccggcuucuaccacauccugaacaaccccaaggccagccugcugagccugacccaguucccccacuucagcagcguggugcugggcaacgccgccggccugggcaucaugggcgaguacagaggcacccccagaaaccaggaccuguacgacgccgccaaggccuacgccgagcagcugaaggagaacggcgugaucaacuacagcgugcuggaccugaccgccgaggagcuggaggccaucaagcaccagcugaaccccaaggacaacgacguggagcugugaggacuaguacuggcugcaucucccuuuccucuguccuccauccuucucccaggauggugaagggggaccugguacccagugauccccaccccaggauccuaaaucaugacuuaccugcuaauaaaaacucauuggaaaagugagaagaucuaaaaaaaaaaaaaaaaaaaaaaaaaaaaaaaaaaaaaaaaaaaaaaaaaaaaaaaaaaaaaaaaugcaucccccccccccccccccccccccccccccccaaaggcucuuuucagagccaccagaauu

SEQ ID NO: 20467 - RNA, 1524 nt, Artificial Sequence
  mRNA product Design f-5 comprising derived and/or modified sequence from HRSV(Memphis-37)__AIY60635.1__N (opt5)
gggagacuuucccauucuguagcagaauuugguguugccuguggucuuggucccgcggagaagcuuaccauggcccugagcaaggugaaacucaacgacacccugaauaaggaucagcuucuguccucuagcaaauacacaauccaaagauccacgggcgacucuauugauacccccaacuaugacguccagaagcacaucaauaaacucugcgggaugcugcuuauuacagaggaugcuaaccauaaguucaccggaguuaucggcaugcuguacgccaugagccggcucgggcgcgaagacacaauuaagauccugagagaugcgggauaucacgugaaagcuaauggcguggacgucaccacacaucggcaggauaucaacgggaaggagaugaaauuugaagugcugacccucgccucccugacgaccgagauucagaucaauauugaaaucgagucucgcaagagcuacaaaaagaugcuuaaggagaugggagaaguugccccugaguauagacacgacuccccggauuguggcaugauuauccugugcauugcugcccucgugaucacaaaacuggcugccggcgaccggagcgggcuuaccgcggucauccgcagagccaacaaugugcugaagaacgaaaugaaacgguacaagggacuccugcccaaagauauugcuaauucuuucuaugagguuuuugagaaguacccucauuucaucgacguguuuguccacuucggcauugcccaauccagcacacgcgggggaucuagaguggaaggcaucuuugcugggcuguucaugaacgccuacggagcgggccaggugaugcuccgguggggcguccuggccaaauccguuaagaauauuaugcuugggcacgcuagcgugcaggccgagauggaacagguggucgagguguaugaauacgcucaaaagcugggaggcgaggccggguuuuaucauauccucaacaaucccaaagccucucugcuuucccugacccaguucccucacuuuagcuccguugugcucggaaacgcugcgggccuggggaucaugggagaguaccgcggcacgcccagaaaccaggaccuguaugaugccgcuaaggccuacgccgaacagcucaaagagaauggcgucauuaacuauucugugcuggaccuuacagcugaggaacuggaagccaucaagcaucaacucaauccuaaagauaacgacguugagcugugaggacuaguacuggcugcaucucccuuuccucuguccuccauccuucucccaggauggugaagggggaccugguacccagugauccccaccccaggauccuaaaucaugacuuaccugcuaauaaaaacucauuggaaaagugagaagaucuaaaaaaaaaaaaaaaaaaaaaaaaaaaaaaaaaaaaaaaaaaaaaaaaaaaaaaaaaaaaaaaaugcaucccccccccccccccccccccccccccccccaaaggcucuuuucagagccaccagaauu

SEQ ID NO: 20468 - RNA, 1524 nt, Artificial Sequence
  mRNA product Design f-5 comprising derived and/or modified sequence from HRSV(Memphis-37)__AIY60635.1__N (opt6)
gggagacuuucccauucuguagcagaauuugguguugccuguggucuuggucccgcggagaagcuuaccauggccuuaaguaaaguaaaauuaaacgacacacuaaacaaagaccaauuacucucaucaucgaaauauacaauacaaagauccacaggagacuccauagauacaccaaauuacgacguacaaaaacauauaaacaaacucugcggaauguuauuaauaacagaagacgcaaaccacaaauucacaggagucauagguaugcuauacgcaaugucaagauuaggaagagaagauacaauaaaaauacuaagagacgcaggauaccacguaaaagcaaacggaguagacguaacaacacauagacaagauauaaacgguaaagaaaugaaauucgaaguacuaacacuagccagucuaacaacagaaauacaaauaaacauagaaauagaaagccgaaaaucauacaaaaaaauguuaaaagaaaugggggaaguagcacccgaauacagacaugauucaccugacugcggaaugauaauacucugcauagcggcauuagucauaacaaaacuagccgcaggagacagaagcggauuaacagcaguaauaagaagagcaaauaauguauuaaaaaaugaaaugaaaagguauaaaggauuacuaccaaaagauauagcaaacucauucuaugaaguuuucgaaaaauacccacacuucauagacgucuucguacacuuuggaauagcacaaagcagcacaagaggaggaagcagaguagaaggaauauucgcaggacuauucaugaaugcauacggagccggacaaguaaugcuaagauggggaguuuuagcaaaaagcguaaaaaacauaauguuaggacacgccuccguccaagccgaaauggaacaaguaguagaaguauacgaauaugcacaaaaacuaggaggagaagcaggauucuaucacauacucaauaacccaaaagcaucacuauugagcuuaacacaauucccacauuuuucauccguaguccuaggaaaugcagcaggcuuaggaauaaugggagaauacagaggcacaccaagaaaucaagacuuauacgaugcagcaaaagcauacgcagaacaacuaaaagaaaacggaguaauaaacuacucaguauuagauuuaacagcagaagaauuagaagcaauaaaacaucaacuaaauccuaaggauaaugauguagaacucuaaggacuaguacuggcugcaucucccuuuccucuguccuccauccuucucccaggauggugaagggggaccugguacccagugauccccaccccaggauccuaaaucaugacuuaccugcuaauaaaaacucauuggaaaagugagaagaucuaaaaaaaaaaaaaaaaaaaaaaaaaaaaaaaaaaaaaaaaaaaaaaaaaaaaaaaaaaaaaaaaugcaucccccccccccccccccccccccccccccccaaaggcucuuuucagagccaccagaauu

SEQ ID NO: 20469 - RNA, 1524 nt, Artificial Sequence
  mRNA product Design f-5 comprising derived and/or modified sequence from HRSV(Memphis-37)__AIY60635.1__N (opt11)
gggagacuuucccauucuguagcagaauuugguguugccuguggucuuggucccgcggagaagcuuaccauggcccuaagcaaagucaaacucaacgacacacuaaacaaagaccaacuccucagcuccagcaaauacaccauccaacgauccaccggcgacuccauagacacccccaacuacgacguccaaaaacacaucaacaaacuaugcggcaugcuccuaaucacagaagacgccaaccacaaauucaccggagucaucggcaugcucuacgccaugagccgccucggccgagaagacacaaucaaaauacuaagagacgccggcuaccacguaaaagccaacggcguagacguaaccacccaccgccaagacaucaacggcaaagaaaugaaauucgaaguucucacccucgccucacuaaccacggaaauccaaauaaacauugaaaucgaaagcagaaaauccuacaaaaagaugcuaaaagaaaugggcgagguagccccagaauaccgccacgacagccccgacugcggaaugaucauccucugcauugcagcccucgucaucaccaaacuagccgccggcgacagaagcggccuaaccgcaguaauccgccgagccaacaacguacucaaaaacgaaaugaaacgcuacaaaggccuccuccccaaagacaucgccaacagcuucuacgaaguauucgaaaaauacccgcacuucaucgacgucuucguacacuucggcauagcccaaagcagcacacgaggcggcucccgcgucgaaggaauauucgccggccuguucaugaacgcauacggagcgggccaagucaugcuccgcugggguguacuagccaaguccgucaaaaacaucaugcuagggcacgcaagcguacaagccgaaauggaacaaguagucgaagucuacgaauacgcacaaaaacuaggcggcgaagccggcuucuaccacauccuaaacaaccccaaagccucauuacucucccucacccaauuuccucacuucuccagcgucguccucggaaacgccgccggccuaggcauaaugggggaauaccgcggcaccccgcgcaaccaagaccucuacgacgcagcaaaagccuacgcagaacaacuaaaagaaaacggagucaucaacuacagcguacuggaccuaaccgccgaagaacucgaagccauaaaacaccaacucaaccccaaagacaacgacgucgagcucuaaggacuaguacuggcugcaucucccuuuccucuguccuccauccuucucccaggauggugaagggggaccugguacccagugauccccaccccaggauccuaaaucaugacuuaccugcuaauaaaaacucauuggaaaagugagaagaucuaaaaaaaaaaaaaaaaaaaaaaaaaaaaaaaaaaaaaaaaaaaaaaaaaaaaaaaaaaaaaaaaugcaucccccccccccccccccccccccccccccccaaaggcucuuuucagagccaccagaauu

SEQ ID NO: 20470 - RNA, 1520 nt, Artificial Sequence
  mRNA product Design g-1 comprising derived and/or modified sequence from HRSV(Memphis-37)__AIY60635.1__N (wt)
gggagacuuucccauucuguagcagaauuugguguugccuguggucuuggucccgcggagaagcuuaccauggcucuuagcaaagucaaguugaacgauacacucaacaaagaucaacuucugucauccagcaaauacaccauccaacggagcacaggagauaguauugauacuccuaauuaugaugugcagaaacacaucaacaaguuauguggcauguuauuaaucacagaagaugcuaaucauaaauucacugggguaauagguauguuauaugcuaugucuagauuaggaagagaagacaccauaaaaauacucagagaugcgggauaucauguaaaagcaaauggaguggauguaacaacacaucgucaagacauuaauggaaaagaaaugaaauuugaaguguuaacauuggcaagcuuaacaacugaaauucaaaucaacauugagauagaaucuaggaaauccuacaaaaaaaugcuaaaagaaaugggagagguggcuccagaauacaggcaugacucuccugauuguggaaugauaauauuauguauagcagcauuaguaauaaccaaauuagcagcaggggauagaucuggucuuacugcugugauuaggagagcuaauaauguucuaaaaaaugaaaugaaacguuauaaaggcuuacuaccaaaggauauagccaacagcuucuaugaaguguuugaaaaauauccucacuuuauagauguuuuuguucauuuugguauagcacaaucuucuaccagagguggcaguagaguugaagggauuuuugcaggauuguuuaugaaugccuauggugcagggcaagugauguuacgguggggagucuuagcaaaaucaguuaaaaauauuaugcuaggacaugcuagugugcaagcagaaauggaacaaguuguggaaguuuaugaauaugcccaaaaauuggguggagaagcaggauucuaccauauauugaacaauccaaaagcaucauuauuaucuuugacucaauuuccccacuucuccaguguaguauugggcaaugcugcuggccuaggcauaaugggagaauacagagguacaccaaggaaucaagaucuauaugaugcugcaaaggcauaugcugaacaacucaaagaaaauggugugauuaacuacaguguauuagacuugacagcagaagaacuagaggcuaucaaacaucagcuuaauccaaaagauaaugauguagagcuuugaggacuaguggaagcauuuuccuggcugauuaaaagaaauuacucagcuauggucaucuguuccuguuagaaggcuaugcagcauauuauauacuaugcgcauguuaugaaaugcauaauaaaaaauuuuaaaaaaucuaaaagaucuaaaaaaaaaaaaaaaaaaaaaaaaaaaaaaaaaaaaaaaaaaaaaaaaaaaaaaaaaaaaaaaaugcaucccccccccccccccccccccccccccccccaaaggcucuuuucagagccaccagaauu

SEQ ID NO: 20471 - RNA, 1520 nt, Artificial Sequence
  mRNA product Design g-1 comprising derived and/or modified sequence from HRSV(Memphis-37)__AIY60635.1__N (opt1)
gggagacuuucccauucuguagcagaauuugguguugccuguggucuuggucccgcggagaagcuuaccauggcccugagcaaggugaagcucaacgacacccugaacaaggaccagcugcucuccagcuccaaguacaccauccagcgcagcaccggcgacuccaucgacacccccaacuacgacguccagaagcacaucaacaagcugugcgggaugcugcucaucaccgaggacgccaaccacaaguucaccggcgugaucgggaugcuguacgcgaugagccggcugggccgcgaggacacgaucaagauccuccgggacgccggguaccacgugaaggccaacggcgucgacgugaccacccaccgccaggacaucaacggcaaggagaugaaguucgaggugcugacccuggccucccucacgaccgagauccagaucaacaucgagaucgagagccggaaguccuacaagaagaugcugaaggagaugggggaggucgccccggaguaccgccacgacagccccgacugcggcaugaucauccugugcaucgcggcccucgugaucaccaagcuggccgccggggaccgguccggccugaccgcggugauccgccgggccaacaacguccucaagaacgagaugaagcgcuacaaggggcugcugcccaaggacaucgccaacagcuucuacgagguguucgagaaguacccccacuucaucgacguguucguccacuucggcaucgcccaguccagcacgcggggcgggucccgcguggagggcaucuucgccgggcuguucaugaacgcguacggcgccggccaggugaugcugcgguggggcguccuggccaagagcgugaagaacaucaugcucgggcacgccuccgugcaggccgagauggagcaggucguggagguguacgaguacgcgcagaagcucgggggcgaggccggguucuaccacauccugaacaacccgaaggccagccuccugucccugacccaguucccccacuucagcagcgucgugcucggcaacgccgccggccuggggaucaugggcgaguaccgcgggacgccccggaaccaggaccuguacgacgcggccaaggccuacgccgagcagcucaaggagaacggcgugaucaacuacuccguccuggaccugaccgccgaggagcucgaggcgaucaagcaccagcugaaccccaaggacaacgacguggagcugugaggacuaguggaagcauuuuccuggcugauuaaaagaaauuacucagcuauggucaucuguuccuguuagaaggcuaugcagcauauuauauacuaugcgcauguuaugaaaugcauaauaaaaaauuuuaaaaaaucuaaaagaucuaaaaaaaaaaaaaaaaaaaaaaaaaaaaaaaaaaaaaaaaaaaaaaaaaaaaaaaaaaaaaaaaugcaucccccccccccccccccccccccccccccccaaaggcucuuuucagagccaccagaauu

SEQ ID NO: 20472 - RNA, 1520 nt, Artificial Sequence
  mRNA product Design g-1 comprising derived and/or modified sequence from HRSV(Memphis-37)__AIY60635.1__N (opt2)
gggagacuuucccauucuguagcagaauuugguguugccuguggucuuggucccgcggagaagcuuaccauggcccucuccaaggucaagcucaacgacacccucaacaaggaccagcuccucuccuccuccaaguacaccauccagcgcuccaccggcgacuccaucgacacccccaacuacgacguccagaagcacaucaacaagcucugcggcaugcuccucaucaccgaggacgccaaccacaaguucaccggcgucaucggcaugcucuacgccaugucccgccucggccgcgaggacaccaucaagauccuccgcgacgccggcuaccacgucaaggccaacggcgucgacgucaccacccaccgccaggacaucaacggcaaggagaugaaguucgagguccucacccucgccucccucaccaccgagauccagaucaacaucgagaucgagucccgcaaguccuacaagaagaugcucaaggagaugggcgaggucgcccccgaguaccgccacgacucccccgacugcggcaugaucauccucugcaucgccgcccucgucaucaccaagcucgccgccggcgaccgcuccggccucaccgccgucauccgccgcgccaacaacguccucaagaacgagaugaagcgcuacaagggccuccuccccaaggacaucgccaacuccuucuacgaggucuucgagaaguacccccacuucaucgacgucuucguccacuucggcaucgcccaguccuccacccgcggcggcucccgcgucgagggcaucuucgccggccucuucaugaacgccuacggcgccggccaggucaugcuccgcuggggcguccucgccaaguccgucaagaacaucaugcucggccacgccuccguccaggccgagauggagcaggucgucgaggucuacgaguacgcccagaagcucggcggcgaggccggcuucuaccacauccucaacaaccccaaggccucccuccucucccucacccaguucccccacuucuccuccgucguccucggcaacgccgccggccucggcaucaugggcgaguaccgcggcaccccccgcaaccaggaccucuacgacgccgccaaggccuacgccgagcagcucaaggagaacggcgucaucaacuacuccguccucgaccucaccgccgaggagcucgaggccaucaagcaccagcucaaccccaaggacaacgacgucgagcucugaggacuaguggaagcauuuuccuggcugauuaaaagaaauuacucagcuauggucaucuguuccuguuagaaggcuaugcagcauauuauauacuaugcgcauguuaugaaaugcauaauaaaaaauuuuaaaaaaucuaaaagaucuaaaaaaaaaaaaaaaaaaaaaaaaaaaaaaaaaaaaaaaaaaaaaaaaaaaaaaaaaaaaaaaaugcaucccccccccccccccccccccccccccccccaaaggcucuuuucagagccaccagaauu

SEQ ID NO: 20473 - RNA, 1520 nt, Artificial Sequence
  mRNA product Design g-1 comprising derived and/or modified sequence from HRSV(Memphis-37)__AIY60635.1__N (opt3)
gggagacuuucccauucuguagcagaauuugguguugccuguggucuuggucccgcggagaagcuuaccauggcccugagcaaggugaaacucaacgacacccuuaauaaggaucagcuguuguccucuucaaaauacacaauccaaagaaguacuggcgacagcauugauacgcccaacuaugacguccagaagcacauaaauaaauuaugcgggaugcugcuaaucaccgaggaugcuaaccauaaguucacaggaguuauugguaugcucuacgcaauguccaggcugggccgggaagacacuaucaagauucuucgcgaugccggguaucacgugaaagcgaauggaguagacgugaccacacaucgacaggauaucaacggcaaggagaugaaauuugaaguccugaccuuggcuucucucacuacagagauacagaucaauauugaaaucgagucgcguaagucauacaaaaagaugcugaaggagaugggugaaguggccccugaguauagacacgacagcccagauugugggaugauuauccugugcauagcagcccucguuauuaccaaauuagcugcaggagacaggaguggccugacggccgugauccggcgcgcuaacaauguccuuaagaacgaaaugaaaagauacaagggcuugcugccgaaagauauugccaauuccuucuaugagguguuugagaaguacccccauuucaucgacguauuuguucacuucgggaucgcgcaaucuagcacuaggggagguucccggguggaaggcauuuuugcagggcuauucaugaacgccuacggagcuggccaggucaugcuccgcuggggugugcuggccaaaucagugaagaauauaaugcuugggcacgcaaguguccaggcugagauggaacagguuguggagguauaugaauacgcccaaaagcugggaggcgaggcgggcuuuuaucauaucuugaacaauccuaaagccagccuccugucuuuaacccaguucccacacuuuuccucagugguccuggggaacgcagcuggacucgguauuaugggcgaguaccgagggacacccagaaaccaggaccuuuaugaugccgcuaaggccuacgcagaacagcugaaagagaauggagugaucaacuauagcguuuuggaccuaacugccgaggaacuggaagcuauaaagcaucaacucaauccuaaagauaacgacguggagcugugaggacuaguggaagcauuuuccuggcugauuaaaagaaauuacucagcuauggucaucuguuccuguuagaaggcuaugcagcauauuauauacuaugcgcauguuaugaaaugcauaauaaaaaauuuuaaaaaaucuaaaagaucuaaaaaaaaaaaaaaaaaaaaaaaaaaaaaaaaaaaaaaaaaaaaaaaaaaaaaaaaaaaaaaaaugcaucccccccccccccccccccccccccccccccaaaggcucuuuucagagccaccagaauu

SEQ ID NO: 20474 - RNA, 1520 nt, Artificial Sequence
  mRNA product Design g-1 comprising derived and/or modified sequence from HRSV(Memphis-37)__AIY60635.1__N (opt4)
gggagacuuucccauucuguagcagaauuugguguugccuguggucuuggucccgcggagaagcuuaccauggcccugagcaaggugaagcugaacgacacccugaacaaggaccagcugcugagcagcagcaaguacaccauccagagaagcaccggcgacagcaucgacacccccaacuacgacgugcagaagcacaucaacaagcugugcggcaugcugcugaucaccgaggacgccaaccacaaguucaccggcgugaucggcaugcuguacgccaugagcagacugggcagagaggacaccaucaagauccugagagacgccggcuaccacgugaaggccaacggcguggacgugaccacccacagacaggacaucaacggcaaggagaugaaguucgaggugcugacccuggccagccugaccaccgagauccagaucaacaucgagaucgagagcagaaagagcuacaagaagaugcugaaggagaugggcgagguggcccccgaguacagacacgacagccccgacugcggcaugaucauccugugcaucgccgcccuggugaucaccaagcuggccgccggcgacagaagcggccugaccgccgugaucagaagagccaacaacgugcugaagaacgagaugaagagauacaagggccugcugcccaaggacaucgccaacagcuucuacgagguguucgagaaguacccccacuucaucgacguguucgugcacuucggcaucgcccagagcagcaccagaggcggcagcagaguggagggcaucuucgccggccuguucaugaacgccuacggcgccggccaggugaugcugagauggggcgugcuggccaagagcgugaagaacaucaugcugggccacgccagcgugcaggccgagauggagcaggugguggagguguacgaguacgcccagaagcugggcggcgaggccggcuucuaccacauccugaacaaccccaaggccagccugcugagccugacccaguucccccacuucagcagcguggugcugggcaacgccgccggccugggcaucaugggcgaguacagaggcacccccagaaaccaggaccuguacgacgccgccaaggccuacgccgagcagcugaaggagaacggcgugaucaacuacagcgugcuggaccugaccgccgaggagcuggaggccaucaagcaccagcugaaccccaaggacaacgacguggagcugugaggacuaguggaagcauuuuccuggcugauuaaaagaaauuacucagcuauggucaucuguuccuguuagaaggcuaugcagcauauuauauacuaugcgcauguuaugaaaugcauaauaaaaaauuuuaaaaaaucuaaaagaucuaaaaaaaaaaaaaaaaaaaaaaaaaaaaaaaaaaaaaaaaaaaaaaaaaaaaaaaaaaaaaaaaugcaucccccccccccccccccccccccccccccccaaaggcucuuuucagagccaccagaauu

SEQ ID NO: 20475 - RNA, 1520 nt, Artificial Sequence
  mRNA product Design g-1 comprising derived and/or modified sequence from HRSV(Memphis-37)__AIY60635.1__N (opt5)
gggagacuuucccauucuguagcagaauuugguguugccuguggucuuggucccgcggagaagcuuaccauggcccugagcaaggugaaacucaacgacacccugaauaaggaucagcuucuguccucuagcaaauacacaauccaaagauccacgggcgacucuauugauacccccaacuaugacguccagaagcacaucaauaaacucugcgggaugcugcuuauuacagaggaugcuaaccauaaguucaccggaguuaucggcaugcuguacgccaugagccggcucgggcgcgaagacacaauuaagauccugagagaugcgggauaucacgugaaagcuaauggcguggacgucaccacacaucggcaggauaucaacgggaaggagaugaaauuugaagugcugacccucgccucccugacgaccgagauucagaucaauauugaaaucgagucucgcaagagcuacaaaaagaugcuuaaggagaugggagaaguugccccugaguauagacacgacuccccggauuguggcaugauuauccugugcauugcugcccucgugaucacaaaacuggcugccggcgaccggagcgggcuuaccgcggucauccgcagagccaacaaugugcugaagaacgaaaugaaacgguacaagggacuccugcccaaagauauugcuaauucuuucuaugagguuuuugagaaguacccucauuucaucgacguguuuguccacuucggcauugcccaauccagcacacgcgggggaucuagaguggaaggcaucuuugcugggcuguucaugaacgccuacggagcgggccaggugaugcuccgguggggcguccuggccaaauccguuaagaauauuaugcuugggcacgcuagcgugcaggccgagauggaacagguggucgagguguaugaauacgcucaaaagcugggaggcgaggccggguuuuaucauauccucaacaaucccaaagccucucugcuuucccugacccaguucccucacuuuagcuccguugugcucggaaacgcugcgggccuggggaucaugggagaguaccgcggcacgcccagaaaccaggaccuguaugaugccgcuaaggccuacgccgaacagcucaaagagaauggcgucauuaacuauucugugcuggaccuuacagcugaggaacuggaagccaucaagcaucaacucaauccuaaagauaacgacguugagcugugaggacuaguggaagcauuuuccuggcugauuaaaagaaauuacucagcuauggucaucuguuccuguuagaaggcuaugcagcauauuauauacuaugcgcauguuaugaaaugcauaauaaaaaauuuuaaaaaaucuaaaagaucuaaaaaaaaaaaaaaaaaaaaaaaaaaaaaaaaaaaaaaaaaaaaaaaaaaaaaaaaaaaaaaaaugcaucccccccccccccccccccccccccccccccaaaggcucuuuucagagccaccagaauu

SEQ ID NO: 20476 - RNA, 1520 nt, Artificial Sequence
  mRNA product Design g-1 comprising derived and/or modified sequence from HRSV(Memphis-37)__AIY60635.1__N (opt6)
gggagacuuucccauucuguagcagaauuugguguugccuguggucuuggucccgcggagaagcuuaccauggccuuaaguaaaguaaaauuaaacgacacacuaaacaaagaccaauuacucucaucaucgaaauauacaauacaaagauccacaggagacuccauagauacaccaaauuacgacguacaaaaacauauaaacaaacucugcggaauguuauuaauaacagaagacgcaaaccacaaauucacaggagucauagguaugcuauacgcaaugucaagauuaggaagagaagauacaauaaaaauacuaagagacgcaggauaccacguaaaagcaaacggaguagacguaacaacacauagacaagauauaaacgguaaagaaaugaaauucgaaguacuaacacuagccagucuaacaacagaaauacaaauaaacauagaaauagaaagccgaaaaucauacaaaaaaauguuaaaagaaaugggggaaguagcacccgaauacagacaugauucaccugacugcggaaugauaauacucugcauagcggcauuagucauaacaaaacuagccgcaggagacagaagcggauuaacagcaguaauaagaagagcaaauaauguauuaaaaaaugaaaugaaaagguauaaaggauuacuaccaaaagauauagcaaacucauucuaugaaguuuucgaaaaauacccacacuucauagacgucuucguacacuuuggaauagcacaaagcagcacaagaggaggaagcagaguagaaggaauauucgcaggacuauucaugaaugcauacggagccggacaaguaaugcuaagauggggaguuuuagcaaaaagcguaaaaaacauaauguuaggacacgccuccguccaagccgaaauggaacaaguaguagaaguauacgaauaugcacaaaaacuaggaggagaagcaggauucuaucacauacucaauaacccaaaagcaucacuauugagcuuaacacaauucccacauuuuucauccguaguccuaggaaaugcagcaggcuuaggaauaaugggagaauacagaggcacaccaagaaaucaagacuuauacgaugcagcaaaagcauacgcagaacaacuaaaagaaaacggaguaauaaacuacucaguauuagauuuaacagcagaagaauuagaagcaauaaaacaucaacuaaauccuaaggauaaugauguagaacucuaaggacuaguggaagcauuuuccuggcugauuaaaagaaauuacucagcuauggucaucuguuccuguuagaaggcuaugcagcauauuauauacuaugcgcauguuaugaaaugcauaauaaaaaauuuuaaaaaaucuaaaagaucuaaaaaaaaaaaaaaaaaaaaaaaaaaaaaaaaaaaaaaaaaaaaaaaaaaaaaaaaaaaaaaaaugcaucccccccccccccccccccccccccccccccaaaggcucuuuucagagccaccagaauu

SEQ ID NO: 20477 - RNA, 1520 nt, Artificial Sequence
  mRNA product Design g-1 comprising derived and/or modified sequence from HRSV(Memphis-37)__AIY60635.1__N (opt11)
gggagacuuucccauucuguagcagaauuugguguugccuguggucuuggucccgcggagaagcuuaccauggcccuaagcaaagucaaacucaacgacacacuaaacaaagaccaacuccucagcuccagcaaauacaccauccaacgauccaccggcgacuccauagacacccccaacuacgacguccaaaaacacaucaacaaacuaugcggcaugcuccuaaucacagaagacgccaaccacaaauucaccggagucaucggcaugcucuacgccaugagccgccucggccgagaagacacaaucaaaauacuaagagacgccggcuaccacguaaaagccaacggcguagacguaaccacccaccgccaagacaucaacggcaaagaaaugaaauucgaaguucucacccucgccucacuaaccacggaaauccaaauaaacauugaaaucgaaagcagaaaauccuacaaaaagaugcuaaaagaaaugggcgagguagccccagaauaccgccacgacagccccgacugcggaaugaucauccucugcauugcagcccucgucaucaccaaacuagccgccggcgacagaagcggccuaaccgcaguaauccgccgagccaacaacguacucaaaaacgaaaugaaacgcuacaaaggccuccuccccaaagacaucgccaacagcuucuacgaaguauucgaaaaauacccgcacuucaucgacgucuucguacacuucggcauagcccaaagcagcacacgaggcggcucccgcgucgaaggaauauucgccggccuguucaugaacgcauacggagcgggccaagucaugcuccgcugggguguacuagccaaguccgucaaaaacaucaugcuagggcacgcaagcguacaagccgaaauggaacaaguagucgaagucuacgaauacgcacaaaaacuaggcggcgaagccggcuucuaccacauccuaaacaaccccaaagccucauuacucucccucacccaauuuccucacuucuccagcgucguccucggaaacgccgccggccuaggcauaaugggggaauaccgcggcaccccgcgcaaccaagaccucuacgacgcagcaaaagccuacgcagaacaacuaaaagaaaacggagucaucaacuacagcguacuggaccuaaccgccgaagaacucgaagccauaaaacaccaacucaaccccaaagacaacgacgucgagcucuaaggacuaguggaagcauuuuccuggcugauuaaaagaaauuacucagcuauggucaucuguuccuguuagaaggcuaugcagcauauuauauacuaugcgcauguuaugaaaugcauaauaaaaaauuuuaaaaaaucuaaaagaucuaaaaaaaaaaaaaaaaaaaaaaaaaaaaaaaaaaaaaaaaaaaaaaaaaaaaaaaaaaaaaaaaugcaucccccccccccccccccccccccccccccccaaaggcucuuuucagagccaccagaauu

SEQ ID NO: 20478 - RNA, 1535 nt, Artificial Sequence
  mRNA product Design g-2 comprising derived and/or modified sequence from HRSV(Memphis-37)__AIY60635.1__N (wt)
gggagaguccgcucagccagguugcagaagcggcuuagcguguguccuaaucuucucucugcguguagguaggccugugccgcaaacaagcuuaccauggcucuuagcaaagucaaguugaacgauacacucaacaaagaucaacuucugucauccagcaaauacaccauccaacggagcacaggagauaguauugauacuccuaauuaugaugugcagaaacacaucaacaaguuauguggcauguuauuaaucacagaagaugcuaaucauaaauucacugggguaauagguauguuauaugcuaugucuagauuaggaagagaagacaccauaaaaauacucagagaugcgggauaucauguaaaagcaaauggaguggauguaacaacacaucgucaagacauuaauggaaaagaaaugaaauuugaaguguuaacauuggcaagcuuaacaacugaaauucaaaucaacauugagauagaaucuaggaaauccuacaaaaaaaugcuaaaagaaaugggagagguggcuccagaauacaggcaugacucuccugauuguggaaugauaauauuauguauagcagcauuaguaauaaccaaauuagcagcaggggauagaucuggucuuacugcugugauuaggagagcuaauaauguucuaaaaaaugaaaugaaacguuauaaaggcuuacuaccaaaggauauagccaacagcuucuaugaaguguuugaaaaauauccucacuuuauagauguuuuuguucauuuugguauagcacaaucuucuaccagagguggcaguagaguugaagggauuuuugcaggauuguuuaugaaugccuauggugcagggcaagugauguuacgguggggagucuuagcaaaaucaguuaaaaauauuaugcuaggacaugcuagugugcaagcagaaauggaacaaguuguggaaguuuaugaauaugcccaaaaauuggguggagaagcaggauucuaccauauauugaacaauccaaaagcaucauuauuaucuuugacucaauuuccccacuucuccaguguaguauugggcaaugcugcuggccuaggcauaaugggagaauacagagguacaccaaggaaucaagaucuauaugaugcugcaaaggcauaugcugaacaacucaaagaaaauggugugauuaacuacaguguauuagacuugacagcagaagaacuagaggcuaucaaacaucagcuuaauccaaaagauaaugauguagagcuuugaggacuaguaauaaggaaacuguaugaaugucugugggcaggaagugaagagauccuucuguaaagguuuuuggaauuaugucugcugaauaauaaacuuuuuugaaauaauaaaucugguagaaaaaugagaucuaaaaaaaaaaaaaaaaaaaaaaaaaaaaaaaaaaaaaaaaaaaaaaaaaaaaaaaaaaaaaaaaugcaucccccccccccccccccccccccccccccccaaaggcucuuuucagagccaccagaauu

SEQ ID NO: 20479 - RNA, 1535 nt, Artificial Sequence
  mRNA product Design g-2 comprising derived and/or modified sequence from HRSV(Memphis-37)__AIY60635.1__N (opt1)
gggagaguccgcucagccagguugcagaagcggcuuagcguguguccuaaucuucucucugcguguagguaggccugugccgcaaacaagcuuaccauggcccugagcaaggugaagcucaacgacacccugaacaaggaccagcugcucuccagcuccaaguacaccauccagcgcagcaccggcgacuccaucgacacccccaacuacgacguccagaagcacaucaacaagcugugcgggaugcugcucaucaccgaggacgccaaccacaaguucaccggcgugaucgggaugcuguacgcgaugagccggcugggccgcgaggacacgaucaagauccuccgggacgccggguaccacgugaaggccaacggcgucgacgugaccacccaccgccaggacaucaacggcaaggagaugaaguucgaggugcugacccuggccucccucacgaccgagauccagaucaacaucgagaucgagagccggaaguccuacaagaagaugcugaaggagaugggggaggucgccccggaguaccgccacgacagccccgacugcggcaugaucauccugugcaucgcggcccucgugaucaccaagcuggccgccggggaccgguccggccugaccgcggugauccgccgggccaacaacguccucaagaacgagaugaagcgcuacaaggggcugcugcccaaggacaucgccaacagcuucuacgagguguucgagaaguacccccacuucaucgacguguucguccacuucggcaucgcccaguccagcacgcggggcgggucccgcguggagggcaucuucgccgggcuguucaugaacgcguacggcgccggccaggugaugcugcgguggggcguccuggccaagagcgugaagaacaucaugcucgggcacgccuccgugcaggccgagauggagcaggucguggagguguacgaguacgcgcagaagcucgggggcgaggccggguucuaccacauccugaacaacccgaaggccagccuccugucccugacccaguucccccacuucagcagcgucgugcucggcaacgccgccggccuggggaucaugggcgaguaccgcgggacgccccggaaccaggaccuguacgacgcggccaaggccuacgccgagcagcucaaggagaacggcgugaucaacuacuccguccuggaccugaccgccgaggagcucgaggcgaucaagcaccagcugaaccccaaggacaacgacguggagcugugaggacuaguaauaaggaaacuguaugaaugucugugggcaggaagugaagagauccuucuguaaagguuuuuggaauuaugucugcugaauaauaaacuuuuuugaaauaauaaaucugguagaaaaaugagaucuaaaaaaaaaaaaaaaaaaaaaaaaaaaaaaaaaaaaaaaaaaaaaaaaaaaaaaaaaaaaaaaaugcaucccccccccccccccccccccccccccccccaaaggcucuuuucagagccaccagaauu

SEQ ID NO: 20480 - RNA, 1535 nt, Artificial Sequence
  mRNA product Design g-2 comprising derived and/or modified sequence from HRSV(Memphis-37)__AIY60635.1__N (opt2)
gggagaguccgcucagccagguugcagaagcggcuuagcguguguccuaaucuucucucugcguguagguaggccugugccgcaaacaagcuuaccauggcccucuccaaggucaagcucaacgacacccucaacaaggaccagcuccucuccuccuccaaguacaccauccagcgcuccaccggcgacuccaucgacacccccaacuacgacguccagaagcacaucaacaagcucugcggcaugcuccucaucaccgaggacgccaaccacaaguucaccggcgucaucggcaugcucuacgccaugucccgccucggccgcgaggacaccaucaagauccuccgcgacgccggcuaccacgucaaggccaacggcgucgacgucaccacccaccgccaggacaucaacggcaaggagaugaaguucgagguccucacccucgccucccucaccaccgagauccagaucaacaucgagaucgagucccgcaaguccuacaagaagaugcucaaggagaugggcgaggucgcccccgaguaccgccacgacucccccgacugcggcaugaucauccucugcaucgccgcccucgucaucaccaagcucgccgccggcgaccgcuccggccucaccgccgucauccgccgcgccaacaacguccucaagaacgagaugaagcgcuacaagggccuccuccccaaggacaucgccaacuccuucuacgaggucuucgagaaguacccccacuucaucgacgucuucguccacuucggcaucgcccaguccuccacccgcggcggcucccgcgucgagggcaucuucgccggccucuucaugaacgccuacggcgccggccaggucaugcuccgcuggggcguccucgccaaguccgucaagaacaucaugcucggccacgccuccguccaggccgagauggagcaggucgucgaggucuacgaguacgcccagaagcucggcggcgaggccggcuucuaccacauccucaacaaccccaaggccucccuccucucccucacccaguucccccacuucuccuccgucguccucggcaacgccgccggccucggcaucaugggcgaguaccgcggcaccccccgcaaccaggaccucuacgacgccgccaaggccuacgccgagcagcucaaggagaacggcgucaucaacuacuccguccucgaccucaccgccgaggagcucgaggccaucaagcaccagcucaaccccaaggacaacgacgucgagcucugaggacuaguaauaaggaaacuguaugaaugucugugggcaggaagugaagagauccuucuguaaagguuuuuggaauuaugucugcugaauaauaaacuuuuuugaaauaauaaaucugguagaaaaaugagaucuaaaaaaaaaaaaaaaaaaaaaaaaaaaaaaaaaaaaaaaaaaaaaaaaaaaaaaaaaaaaaaaaugcaucccccccccccccccccccccccccccccccaaaggcucuuuucagagccaccagaauu

SEQ ID NO: 20481 - RNA, 1535 nt, Artificial Sequence
  mRNA product Design g-2 comprising derived and/or modified sequence from HRSV(Memphis-37)__AIY60635.1__N (opt3)
gggagaguccgcucagccagguugcagaagcggcuuagcguguguccuaaucuucucucugcguguagguaggccugugccgcaaacaagcuuaccauggcccugagcaaggugaaacucaacgacacccuuaauaaggaucagcuguuguccucuucaaaauacacaauccaaagaaguacuggcgacagcauugauacgcccaacuaugacguccagaagcacauaaauaaauuaugcgggaugcugcuaaucaccgaggaugcuaaccauaaguucacaggaguuauugguaugcucuacgcaauguccaggcugggccgggaagacacuaucaagauucuucgcgaugccggguaucacgugaaagcgaauggaguagacgugaccacacaucgacaggauaucaacggcaaggagaugaaauuugaaguccugaccuuggcuucucucacuacagagauacagaucaauauugaaaucgagucgcguaagucauacaaaaagaugcugaaggagaugggugaaguggccccugaguauagacacgacagcccagauugugggaugauuauccugugcauagcagcccucguuauuaccaaauuagcugcaggagacaggaguggccugacggccgugauccggcgcgcuaacaauguccuuaagaacgaaaugaaaagauacaagggcuugcugccgaaagauauugccaauuccuucuaugagguguuugagaaguacccccauuucaucgacguauuuguucacuucgggaucgcgcaaucuagcacuaggggagguucccggguggaaggcauuuuugcagggcuauucaugaacgccuacggagcuggccaggucaugcuccgcuggggugugcuggccaaaucagugaagaauauaaugcuugggcacgcaaguguccaggcugagauggaacagguuguggagguauaugaauacgcccaaaagcugggaggcgaggcgggcuuuuaucauaucuugaacaauccuaaagccagccuccugucuuuaacccaguucccacacuuuuccucagugguccuggggaacgcagcuggacucgguauuaugggcgaguaccgagggacacccagaaaccaggaccuuuaugaugccgcuaaggccuacgcagaacagcugaaagagaauggagugaucaacuauagcguuuuggaccuaacugccgaggaacuggaagcuauaaagcaucaacucaauccuaaagauaacgacguggagcugugaggacuaguaauaaggaaacuguaugaaugucugugggcaggaagugaagagauccuucuguaaagguuuuuggaauuaugucugcugaauaauaaacuuuuuugaaauaauaaaucugguagaaaaaugagaucuaaaaaaaaaaaaaaaaaaaaaaaaaaaaaaaaaaaaaaaaaaaaaaaaaaaaaaaaaaaaaaaaugcaucccccccccccccccccccccccccccccccaaaggcucuuuucagagccaccagaauu

SEQ ID NO: 20482 - RNA, 1535 nt, Artificial Sequence
  mRNA product Design g-2 comprising derived and/or modified sequence from HRSV(Memphis-37)__AIY60635.1__N (opt4)
gggagaguccgcucagccagguugcagaagcggcuuagcguguguccuaaucuucucucugcguguagguaggccugugccgcaaacaagcuuaccauggcccugagcaaggugaagcugaacgacacccugaacaaggaccagcugcugagcagcagcaaguacaccauccagagaagcaccggcgacagcaucgacacccccaacuacgacgugcagaagcacaucaacaagcugugcggcaugcugcugaucaccgaggacgccaaccacaaguucaccggcgugaucggcaugcuguacgccaugagcagacugggcagagaggacaccaucaagauccugagagacgccggcuaccacgugaaggccaacggcguggacgugaccacccacagacaggacaucaacggcaaggagaugaaguucgaggugcugacccuggccagccugaccaccgagauccagaucaacaucgagaucgagagcagaaagagcuacaagaagaugcugaaggagaugggcgagguggcccccgaguacagacacgacagccccgacugcggcaugaucauccugugcaucgccgcccuggugaucaccaagcuggccgccggcgacagaagcggccugaccgccgugaucagaagagccaacaacgugcugaagaacgagaugaagagauacaagggccugcugcccaaggacaucgccaacagcuucuacgagguguucgagaaguacccccacuucaucgacguguucgugcacuucggcaucgcccagagcagcaccagaggcggcagcagaguggagggcaucuucgccggccuguucaugaacgccuacggcgccggccaggugaugcugagauggggcgugcuggccaagagcgugaagaacaucaugcugggccacgccagcgugcaggccgagauggagcaggugguggagguguacgaguacgcccagaagcugggcggcgaggccggcuucuaccacauccugaacaaccccaaggccagccugcugagccugacccaguucccccacuucagcagcguggugcugggcaacgccgccggccugggcaucaugggcgaguacagaggcacccccagaaaccaggaccuguacgacgccgccaaggccuacgccgagcagcugaaggagaacggcgugaucaacuacagcgugcuggaccugaccgccgaggagcuggaggccaucaagcaccagcugaaccccaaggacaacgacguggagcugugaggacuaguaauaaggaaacuguaugaaugucugugggcaggaagugaagagauccuucuguaaagguuuuuggaauuaugucugcugaauaauaaacuuuuuugaaauaauaaaucugguagaaaaaugagaucuaaaaaaaaaaaaaaaaaaaaaaaaaaaaaaaaaaaaaaaaaaaaaaaaaaaaaaaaaaaaaaaaugcaucccccccccccccccccccccccccccccccaaaggcucuuuucagagccaccagaauu

SEQ ID NO: 20483 - RNA, 1535 nt, Artificial Sequence
  mRNA product Design g-2 comprising derived and/or modified sequence from HRSV(Memphis-37)__AIY60635.1__N (opt5)
gggagaguccgcucagccagguugcagaagcggcuuagcguguguccuaaucuucucucugcguguagguaggccugugccgcaaacaagcuuaccauggcccugagcaaggugaaacucaacgacacccugaauaaggaucagcuucuguccucuagcaaauacacaauccaaagauccacgggcgacucuauugauacccccaacuaugacguccagaagcacaucaauaaacucugcgggaugcugcuuauuacagaggaugcuaaccauaaguucaccggaguuaucggcaugcuguacgccaugagccggcucgggcgcgaagacacaauuaagauccugagagaugcgggauaucacgugaaagcuaauggcguggacgucaccacacaucggcaggauaucaacgggaaggagaugaaauuugaagugcugacccucgccucccugacgaccgagauucagaucaauauugaaaucgagucucgcaagagcuacaaaaagaugcuuaaggagaugggagaaguugccccugaguauagacacgacuccccggauuguggcaugauuauccugugcauugcugcccucgugaucacaaaacuggcugccggcgaccggagcgggcuuaccgcggucauccgcagagccaacaaugugcugaagaacgaaaugaaacgguacaagggacuccugcccaaagauauugcuaauucuuucuaugagguuuuugagaaguacccucauuucaucgacguguuuguccacuucggcauugcccaauccagcacacgcgggggaucuagaguggaaggcaucuuugcugggcuguucaugaacgccuacggagcgggccaggugaugcuccgguggggcguccuggccaaauccguuaagaauauuaugcuugggcacgcuagcgugcaggccgagauggaacagguggucgagguguaugaauacgcucaaaagcugggaggcgaggccggguuuuaucauauccucaacaaucccaaagccucucugcuuucccugacccaguucccucacuuuagcuccguugugcucggaaacgcugcgggccuggggaucaugggagaguaccgcggcacgcccagaaaccaggaccuguaugaugccgcuaaggccuacgccgaacagcucaaagagaauggcgucauuaacuauucugugcuggaccuuacagcugaggaacuggaagccaucaagcaucaacucaauccuaaagauaacgacguugagcugugaggacuaguaauaaggaaacuguaugaaugucugugggcaggaagugaagagauccuucuguaaagguuuuuggaauuaugucugcugaauaauaaacuuuuuugaaauaauaaaucugguagaaaaaugagaucuaaaaaaaaaaaaaaaaaaaaaaaaaaaaaaaaaaaaaaaaaaaaaaaaaaaaaaaaaaaaaaaaugcaucccccccccccccccccccccccccccccccaaaggcucuuuucagagccaccagaauu

SEQ ID NO: 20484 - RNA, 1535 nt, Artificial Sequence
  mRNA product Design g-2 comprising derived and/or modified sequence from HRSV(Memphis-37)__AIY60635.1__N (opt6)
gggagaguccgcucagccagguugcagaagcggcuuagcguguguccuaaucuucucucugcguguagguaggccugugccgcaaacaagcuuaccauggccuuaaguaaaguaaaauuaaacgacacacuaaacaaagaccaauuacucucaucaucgaaauauacaauacaaagauccacaggagacuccauagauacaccaaauuacgacguacaaaaacauauaaacaaacucugcggaauguuauuaauaacagaagacgcaaaccacaaauucacaggagucauagguaugcuauacgcaaugucaagauuaggaagagaagauacaauaaaaauacuaagagacgcaggauaccacguaaaagcaaacggaguagacguaacaacacauagacaagauauaaacgguaaagaaaugaaauucgaaguacuaacacuagccagucuaacaacagaaauacaaauaaacauagaaauagaaagccgaaaaucauacaaaaaaauguuaaaagaaaugggggaaguagcacccgaauacagacaugauucaccugacugcggaaugauaauacucugcauagcggcauuagucauaacaaaacuagccgcaggagacagaagcggauuaacagcaguaauaagaagagcaaauaauguauuaaaaaaugaaaugaaaagguauaaaggauuacuaccaaaagauauagcaaacucauucuaugaaguuuucgaaaaauacccacacuucauagacgucuucguacacuuuggaauagcacaaagcagcacaagaggaggaagcagaguagaaggaauauucgcaggacuauucaugaaugcauacggagccggacaaguaaugcuaagauggggaguuuuagcaaaaagcguaaaaaacauaauguuaggacacgccuccguccaagccgaaauggaacaaguaguagaaguauacgaauaugcacaaaaacuaggaggagaagcaggauucuaucacauacucaauaacccaaaagcaucacuauugagcuuaacacaauucccacauuuuucauccguaguccuaggaaaugcagcaggcuuaggaauaaugggagaauacagaggcacaccaagaaaucaagacuuauacgaugcagcaaaagcauacgcagaacaacuaaaagaaaacggaguaauaaacuacucaguauuagauuuaacagcagaagaauuagaagcaauaaaacaucaacuaaauccuaaggauaaugauguagaacucuaaggacuaguaauaaggaaacuguaugaaugucugugggcaggaagugaagagauccuucuguaaagguuuuuggaauuaugucugcugaauaauaaacuuuuuugaaauaauaaaucugguagaaaaaugagaucuaaaaaaaaaaaaaaaaaaaaaaaaaaaaaaaaaaaaaaaaaaaaaaaaaaaaaaaaaaaaaaaaugcaucccccccccccccccccccccccccccccccaaaggcucuuuucagagccaccagaauu

SEQ ID NO: 20485 - RNA, 1535 nt, Artificial Sequence
  mRNA product Design g-2 comprising derived and/or modified sequence from HRSV(Memphis-37)__AIY60635.1__N (opt11)
gggagaguccgcucagccagguugcagaagcggcuuagcguguguccuaaucuucucucugcguguagguaggccugugccgcaaacaagcuuaccauggcccuaagcaaagucaaacucaacgacacacuaaacaaagaccaacuccucagcuccagcaaauacaccauccaacgauccaccggcgacuccauagacacccccaacuacgacguccaaaaacacaucaacaaacuaugcggcaugcuccuaaucacagaagacgccaaccacaaauucaccggagucaucggcaugcucuacgccaugagccgccucggccgagaagacacaaucaaaauacuaagagacgccggcuaccacguaaaagccaacggcguagacguaaccacccaccgccaagacaucaacggcaaagaaaugaaauucgaaguucucacccucgccucacuaaccacggaaauccaaauaaacauugaaaucgaaagcagaaaauccuacaaaaagaugcuaaaagaaaugggcgagguagccccagaauaccgccacgacagccccgacugcggaaugaucauccucugcauugcagcccucgucaucaccaaacuagccgccggcgacagaagcggccuaaccgcaguaauccgccgagccaacaacguacucaaaaacgaaaugaaacgcuacaaaggccuccuccccaaagacaucgccaacagcuucuacgaaguauucgaaaaauacccgcacuucaucgacgucuucguacacuucggcauagcccaaagcagcacacgaggcggcucccgcgucgaaggaauauucgccggccuguucaugaacgcauacggagcgggccaagucaugcuccgcugggguguacuagccaaguccgucaaaaacaucaugcuagggcacgcaagcguacaagccgaaauggaacaaguagucgaagucuacgaauacgcacaaaaacuaggcggcgaagccggcuucuaccacauccuaaacaaccccaaagccucauuacucucccucacccaauuuccucacuucuccagcgucguccucggaaacgccgccggccuaggcauaaugggggaauaccgcggcaccccgcgcaaccaagaccucuacgacgcagcaaaagccuacgcagaacaacuaaaagaaaacggagucaucaacuacagcguacuggaccuaaccgccgaagaacucgaagccauaaaacaccaacucaaccccaaagacaacgacgucgagcucuaaggacuaguaauaaggaaacuguaugaaugucugugggcaggaagugaagagauccuucuguaaagguuuuuggaauuaugucugcugaauaauaaacuuuuuugaaauaauaaaucugguagaaaaaugagaucuaaaaaaaaaaaaaaaaaaaaaaaaaaaaaaaaaaaaaaaaaaaaaaaaaaaaaaaaaaaaaaaaugcaucccccccccccccccccccccccccccccccaaaggcucuuuucagagccaccagaauu

SEQ ID NO: 20486 - RNA, 1767 nt, Artificial Sequence
  mRNA product Design g-3 comprising derived and/or modified sequence from HRSV(Memphis-37)__AIY60635.1__N (wt)
gggagaguccgcucagccagguugcagaagcggcuuagcguguguccuaaucuucucucugcguguagguaggccugugccgcaaacaagcuuaccauggcucuuagcaaagucaaguugaacgauacacucaacaaagaucaacuucugucauccagcaaauacaccauccaacggagcacaggagauaguauugauacuccuaauuaugaugugcagaaacacaucaacaaguuauguggcauguuauuaaucacagaagaugcuaaucauaaauucacugggguaauagguauguuauaugcuaugucuagauuaggaagagaagacaccauaaaaauacucagagaugcgggauaucauguaaaagcaaauggaguggauguaacaacacaucgucaagacauuaauggaaaagaaaugaaauuugaaguguuaacauuggcaagcuuaacaacugaaauucaaaucaacauugagauagaaucuaggaaauccuacaaaaaaaugcuaaaagaaaugggagagguggcuccagaauacaggcaugacucuccugauuguggaaugauaauauuauguauagcagcauuaguaauaaccaaauuagcagcaggggauagaucuggucuuacugcugugauuaggagagcuaauaauguucuaaaaaaugaaaugaaacguuauaaaggcuuacuaccaaaggauauagccaacagcuucuaugaaguguuugaaaaauauccucacuuuauagauguuuuuguucauuuugguauagcacaaucuucuaccagagguggcaguagaguugaagggauuuuugcaggauuguuuaugaaugccuauggugcagggcaagugauguuacgguggggagucuuagcaaaaucaguuaaaaauauuaugcuaggacaugcuagugugcaagcagaaauggaacaaguuguggaaguuuaugaauaugcccaaaaauuggguggagaagcaggauucuaccauauauugaacaauccaaaagcaucauuauuaucuuugacucaauuuccccacuucuccaguguaguauugggcaaugcugcuggccuaggcauaaugggagaauacagagguacaccaaggaaucaagaucuauaugaugcugcaaaggcauaugcugaacaacucaaagaaaauggugugauuaacuacaguguauuagacuugacagcagaagaacuagaggcuaucaaacaucagcuuaauccaaaagauaaugauguagagcuuugaggacuagugaagggaacacccaaauuuaauucagccuuaagcacaauuaauuaagagugaaacguaauuguacaagcaguuggucacccaccauagggcaugaucaacaccgcaaccuuuccuuuuucccccagugauucugaaaaaccccucuucccuucagcuugcuuagauguuccaaauuuaguaagcuuaaggcggccuacagaagaaaaagaaaaaaaaggccacaaaaguucccucucacuuucaguaaauaaaauaaaagcagcaacagaaauaaagaaauaaaugaaauucaaaaugaaauaaauauuguguugugcagcauuaaaaaaucaauaaaaauuaaaaaugagcaagaucuaaaaaaaaaaaaaaaaaaaaaaaaaaaaaaaaaaaaaaaaaaaaaaaaaaaaaaaaaaaaaaaaugcaucccccccccccccccccccccccccccccccaaaggcucuuuucagagccaccagaauu

SEQ ID NO: 20487 - RNA, 1767 nt, Artificial Sequence
  mRNA product Design g-3 comprising derived and/or modified sequence from HRSV(Memphis-37)__AIY60635.1__N (opt1)
gggagaguccgcucagccagguugcagaagcggcuuagcguguguccuaaucuucucucugcguguagguaggccugugccgcaaacaagcuuaccauggcccugagcaaggugaagcucaacgacacccugaacaaggaccagcugcucuccagcuccaaguacaccauccagcgcagcaccggcgacuccaucgacacccccaacuacgacguccagaagcacaucaacaagcugugcgggaugcugcucaucaccgaggacgccaaccacaaguucaccggcgugaucgggaugcuguacgcgaugagccggcugggccgcgaggacacgaucaagauccuccgggacgccggguaccacgugaaggccaacggcgucgacgugaccacccaccgccaggacaucaacggcaaggagaugaaguucgaggugcugacccuggccucccucacgaccgagauccagaucaacaucgagaucgagagccggaaguccuacaagaagaugcugaaggagaugggggaggucgccccggaguaccgccacgacagccccgacugcggcaugaucauccugugcaucgcggcccucgugaucaccaagcuggccgccggggaccgguccggccugaccgcggugauccgccgggccaacaacguccucaagaacgagaugaagcgcuacaaggggcugcugcccaaggacaucgccaacagcuucuacgagguguucgagaaguacccccacuucaucgacguguucguccacuucggcaucgcccaguccagcacgcggggcgggucccgcguggagggcaucuucgccgggcuguucaugaacgcguacggcgccggccaggugaugcugcgguggggcguccuggccaagagcgugaagaacaucaugcucgggcacgccuccgugcaggccgagauggagcaggucguggagguguacgaguacgcgcagaagcucgggggcgaggccggguucuaccacauccugaacaacccgaaggccagccuccugucccugacccaguucccccacuucagcagcgucgugcucggcaacgccgccggccuggggaucaugggcgaguaccgcgggacgccccggaaccaggaccuguacgacgcggccaaggccuacgccgagcagcucaaggagaacggcgugaucaacuacuccguccuggaccugaccgccgaggagcucgaggcgaucaagcaccagcugaaccccaaggacaacgacguggagcugugaggacuagugaagggaacacccaaauuuaauucagccuuaagcacaauuaauuaagagugaaacguaauuguacaagcaguuggucacccaccauagggcaugaucaacaccgcaaccuuuccuuuuucccccagugauucugaaaaaccccucuucccuucagcuugcuuagauguuccaaauuuaguaagcuuaaggcggccuacagaagaaaaagaaaaaaaaggccacaaaaguucccucucacuuucaguaaauaaaauaaaagcagcaacagaaauaaagaaauaaaugaaauucaaaaugaaauaaauauuguguugugcagcauuaaaaaaucaauaaaaauuaaaaaugagcaagaucuaaaaaaaaaaaaaaaaaaaaaaaaaaaaaaaaaaaaaaaaaaaaaaaaaaaaaaaaaaaaaaaaugcaucccccccccccccccccccccccccccccccaaaggcucuuuucagagccaccagaauu

SEQ ID NO: 20488 - RNA, 1767 nt, Artificial Sequence
  mRNA product Design g-3 comprising derived and/or modified sequence from HRSV(Memphis-37)__AIY60635.1__N (opt2)
gggagaguccgcucagccagguugcagaagcggcuuagcguguguccuaaucuucucucugcguguagguaggccugugccgcaaacaagcuuaccauggcccucuccaaggucaagcucaacgacacccucaacaaggaccagcuccucuccuccuccaaguacaccauccagcgcuccaccggcgacuccaucgacacccccaacuacgacguccagaagcacaucaacaagcucugcggcaugcuccucaucaccgaggacgccaaccacaaguucaccggcgucaucggcaugcucuacgccaugucccgccucggccgcgaggacaccaucaagauccuccgcgacgccggcuaccacgucaaggccaacggcgucgacgucaccacccaccgccaggacaucaacggcaaggagaugaaguucgagguccucacccucgccucccucaccaccgagauccagaucaacaucgagaucgagucccgcaaguccuacaagaagaugcucaaggagaugggcgaggucgcccccgaguaccgccacgacucccccgacugcggcaugaucauccucugcaucgccgcccucgucaucaccaagcucgccgccggcgaccgcuccggccucaccgccgucauccgccgcgccaacaacguccucaagaacgagaugaagcgcuacaagggccuccuccccaaggacaucgccaacuccuucuacgaggucuucgagaaguacccccacuucaucgacgucuucguccacuucggcaucgcccaguccuccacccgcggcggcucccgcgucgagggcaucuucgccggccucuucaugaacgccuacggcgccggccaggucaugcuccgcuggggcguccucgccaaguccgucaagaacaucaugcucggccacgccuccguccaggccgagauggagcaggucgucgaggucuacgaguacgcccagaagcucggcggcgaggccggcuucuaccacauccucaacaaccccaaggccucccuccucucccucacccaguucccccacuucuccuccgucguccucggcaacgccgccggccucggcaucaugggcgaguaccgcggcaccccccgcaaccaggaccucuacgacgccgccaaggccuacgccgagcagcucaaggagaacggcgucaucaacuacuccguccucgaccucaccgccgaggagcucgaggccaucaagcaccagcucaaccccaaggacaacgacgucgagcucugaggacuagugaagggaacacccaaauuuaauucagccuuaagcacaauuaauuaagagugaaacguaauuguacaagcaguuggucacccaccauagggcaugaucaacaccgcaaccuuuccuuuuucccccagugauucugaaaaaccccucuucccuucagcuugcuuagauguuccaaauuuaguaagcuuaaggcggccuacagaagaaaaagaaaaaaaaggccacaaaaguucccucucacuuucaguaaauaaaauaaaagcagcaacagaaauaaagaaauaaaugaaauucaaaaugaaauaaauauuguguugugcagcauuaaaaaaucaauaaaaauuaaaaaugagcaagaucuaaaaaaaaaaaaaaaaaaaaaaaaaaaaaaaaaaaaaaaaaaaaaaaaaaaaaaaaaaaaaaaaugcaucccccccccccccccccccccccccccccccaaaggcucuuuucagagccaccagaauu

SEQ ID NO: 20489 - RNA, 1767 nt, Artificial Sequence
  mRNA product Design g-3 comprising derived and/or modified sequence from HRSV(Memphis-37)__AIY60635.1__N (opt3)
gggagaguccgcucagccagguugcagaagcggcuuagcguguguccuaaucuucucucugcguguagguaggccugugccgcaaacaagcuuaccauggcccugagcaaggugaaacucaacgacacccuuaauaaggaucagcuguuguccucuucaaaauacacaauccaaagaaguacuggcgacagcauugauacgcccaacuaugacguccagaagcacauaaauaaauuaugcgggaugcugcuaaucaccgaggaugcuaaccauaaguucacaggaguuauugguaugcucuacgcaauguccaggcugggccgggaagacacuaucaagauucuucgcgaugccggguaucacgugaaagcgaauggaguagacgugaccacacaucgacaggauaucaacggcaaggagaugaaauuugaaguccugaccuuggcuucucucacuacagagauacagaucaauauugaaaucgagucgcguaagucauacaaaaagaugcugaaggagaugggugaaguggccccugaguauagacacgacagcccagauugugggaugauuauccugugcauagcagcccucguuauuaccaaauuagcugcaggagacaggaguggccugacggccgugauccggcgcgcuaacaauguccuuaagaacgaaaugaaaagauacaagggcuugcugccgaaagauauugccaauuccuucuaugagguguuugagaaguacccccauuucaucgacguauuuguucacuucgggaucgcgcaaucuagcacuaggggagguucccggguggaaggcauuuuugcagggcuauucaugaacgccuacggagcuggccaggucaugcuccgcuggggugugcuggccaaaucagugaagaauauaaugcuugggcacgcaaguguccaggcugagauggaacagguuguggagguauaugaauacgcccaaaagcugggaggcgaggcgggcuuuuaucauaucuugaacaauccuaaagccagccuccugucuuuaacccaguucccacacuuuuccucagugguccuggggaacgcagcuggacucgguauuaugggcgaguaccgagggacacccagaaaccaggaccuuuaugaugccgcuaaggccuacgcagaacagcugaaagagaauggagugaucaacuauagcguuuuggaccuaacugccgaggaacuggaagcuauaaagcaucaacucaauccuaaagauaacgacguggagcugugaggacuagugaagggaacacccaaauuuaauucagccuuaagcacaauuaauuaagagugaaacguaauuguacaagcaguuggucacccaccauagggcaugaucaacaccgcaaccuuuccuuuuucccccagugauucugaaaaaccccucuucccuucagcuugcuuagauguuccaaauuuaguaagcuuaaggcggccuacagaagaaaaagaaaaaaaaggccacaaaaguucccucucacuuucaguaaauaaaauaaaagcagcaacagaaauaaagaaauaaaugaaauucaaaaugaaauaaauauuguguugugcagcauuaaaaaaucaauaaaaauuaaaaaugagcaagaucuaaaaaaaaaaaaaaaaaaaaaaaaaaaaaaaaaaaaaaaaaaaaaaaaaaaaaaaaaaaaaaaaugcaucccccccccccccccccccccccccccccccaaaggcucuuuucagagccaccagaauu

SEQ ID NO: 20490 - RNA, 1767 nt, Artificial Sequence
  mRNA product Design g-3 comprising derived and/or modified sequence from HRSV(Memphis-37)__AIY60635.1__N (opt4)
gggagaguccgcucagccagguugcagaagcggcuuagcguguguccuaaucuucucucugcguguagguaggccugugccgcaaacaagcuuaccauggcccugagcaaggugaagcugaacgacacccugaacaaggaccagcugcugagcagcagcaaguacaccauccagagaagcaccggcgacagcaucgacacccccaacuacgacgugcagaagcacaucaacaagcugugcggcaugcugcugaucaccgaggacgccaaccacaaguucaccggcgugaucggcaugcuguacgccaugagcagacugggcagagaggacaccaucaagauccugagagacgccggcuaccacgugaaggccaacggcguggacgugaccacccacagacaggacaucaacggcaaggagaugaaguucgaggugcugacccuggccagccugaccaccgagauccagaucaacaucgagaucgagagcagaaagagcuacaagaagaugcugaaggagaugggcgagguggcccccgaguacagacacgacagccccgacugcggcaugaucauccugugcaucgccgcccuggugaucaccaagcuggccgccggcgacagaagcggccugaccgccgugaucagaagagccaacaacgugcugaagaacgagaugaagagauacaagggccugcugcccaaggacaucgccaacagcuucuacgagguguucgagaaguacccccacuucaucgacguguucgugcacuucggcaucgcccagagcagcaccagaggcggcagcagaguggagggcaucuucgccggccuguucaugaacgccuacggcgccggccaggugaugcugagauggggcgugcuggccaagagcgugaagaacaucaugcugggccacgccagcgugcaggccgagauggagcaggugguggagguguacgaguacgcccagaagcugggcggcgaggccggcuucuaccacauccugaacaaccccaaggccagccugcugagccugacccaguucccccacuucagcagcguggugcugggcaacgccgccggccugggcaucaugggcgaguacagaggcacccccagaaaccaggaccuguacgacgccgccaaggccuacgccgagcagcugaaggagaacggcgugaucaacuacagcgugcuggaccugaccgccgaggagcuggaggccaucaagcaccagcugaaccccaaggacaacgacguggagcugugaggacuagugaagggaacacccaaauuuaauucagccuuaagcacaauuaauuaagagugaaacguaauuguacaagcaguuggucacccaccauagggcaugaucaacaccgcaaccuuuccuuuuucccccagugauucugaaaaaccccucuucccuucagcuugcuuagauguuccaaauuuaguaagcuuaaggcggccuacagaagaaaaagaaaaaaaaggccacaaaaguucccucucacuuucaguaaauaaaauaaaagcagcaacagaaauaaagaaauaaaugaaauucaaaaugaaauaaauauuguguugugcagcauuaaaaaaucaauaaaaauuaaaaaugagcaagaucuaaaaaaaaaaaaaaaaaaaaaaaaaaaaaaaaaaaaaaaaaaaaaaaaaaaaaaaaaaaaaaaaugcaucccccccccccccccccccccccccccccccaaaggcucuuuucagagccaccagaauu

SEQ ID NO: 20491 - RNA, 1767 nt, Artificial Sequence
  mRNA product Design g-3 comprising derived and/or modified sequence from HRSV(Memphis-37)__AIY60635.1__N (opt5)
gggagaguccgcucagccagguugcagaagcggcuuagcguguguccuaaucuucucucugcguguagguaggccugugccgcaaacaagcuuaccauggcccugagcaaggugaaacucaacgacacccugaauaaggaucagcuucuguccucuagcaaauacacaauccaaagauccacgggcgacucuauugauacccccaacuaugacguccagaagcacaucaauaaacucugcgggaugcugcuuauuacagaggaugcuaaccauaaguucaccggaguuaucggcaugcuguacgccaugagccggcucgggcgcgaagacacaauuaagauccugagagaugcgggauaucacgugaaagcuaauggcguggacgucaccacacaucggcaggauaucaacgggaaggagaugaaauuugaagugcugacccucgccucccugacgaccgagauucagaucaauauugaaaucgagucucgcaagagcuacaaaaagaugcuuaaggagaugggagaaguugccccugaguauagacacgacuccccggauuguggcaugauuauccugugcauugcugcccucgugaucacaaaacuggcugccggcgaccggagcgggcuuaccgcggucauccgcagagccaacaaugugcugaagaacgaaaugaaacgguacaagggacuccugcccaaagauauugcuaauucuuucuaugagguuuuugagaaguacccucauuucaucgacguguuuguccacuucggcauugcccaauccagcacacgcgggggaucuagaguggaaggcaucuuugcugggcuguucaugaacgccuacggagcgggccaggugaugcuccgguggggcguccuggccaaauccguuaagaauauuaugcuugggcacgcuagcgugcaggccgagauggaacagguggucgagguguaugaauacgcucaaaagcugggaggcgaggccggguuuuaucauauccucaacaaucccaaagccucucugcuuucccugacccaguucccucacuuuagcuccguugugcucggaaacgcugcgggccuggggaucaugggagaguaccgcggcacgcccagaaaccaggaccuguaugaugccgcuaaggccuacgccgaacagcucaaagagaauggcgucauuaacuauucugugcuggaccuuacagcugaggaacuggaagccaucaagcaucaacucaauccuaaagauaacgacguugagcugugaggacuagugaagggaacacccaaauuuaauucagccuuaagcacaauuaauuaagagugaaacguaauuguacaagcaguuggucacccaccauagggcaugaucaacaccgcaaccuuuccuuuuucccccagugauucugaaaaaccccucuucccuucagcuugcuuagauguuccaaauuuaguaagcuuaaggcggccuacagaagaaaaagaaaaaaaaggccacaaaaguucccucucacuuucaguaaauaaaauaaaagcagcaacagaaauaaagaaauaaaugaaauucaaaaugaaauaaauauuguguugugcagcauuaaaaaaucaauaaaaauuaaaaaugagcaagaucuaaaaaaaaaaaaaaaaaaaaaaaaaaaaaaaaaaaaaaaaaaaaaaaaaaaaaaaaaaaaaaaaugcaucccccccccccccccccccccccccccccccaaaggcucuuuucagagccaccagaauu

SEQ ID NO: 20492 - RNA, 1767 nt, Artificial Sequence
  mRNA product Design g-3 comprising derived and/or modified sequence from HRSV(Memphis-37)__AIY60635.1__N (opt6)
gggagaguccgcucagccagguugcagaagcggcuuagcguguguccuaaucuucucucugcguguagguaggccugugccgcaaacaagcuuaccauggccuuaaguaaaguaaaauuaaacgacacacuaaacaaagaccaauuacucucaucaucgaaauauacaauacaaagauccacaggagacuccauagauacaccaaauuacgacguacaaaaacauauaaacaaacucugcggaauguuauuaauaacagaagacgcaaaccacaaauucacaggagucauagguaugcuauacgcaaugucaagauuaggaagagaagauacaauaaaaauacuaagagacgcaggauaccacguaaaagcaaacggaguagacguaacaacacauagacaagauauaaacgguaaagaaaugaaauucgaaguacuaacacuagccagucuaacaacagaaauacaaauaaacauagaaauagaaagccgaaaaucauacaaaaaaauguuaaaagaaaugggggaaguagcacccgaauacagacaugauucaccugacugcggaaugauaauacucugcauagcggcauuagucauaacaaaacuagccgcaggagacagaagcggauuaacagcaguaauaagaagagcaaauaauguauuaaaaaaugaaaugaaaagguauaaaggauuacuaccaaaagauauagcaaacucauucuaugaaguuuucgaaaaauacccacacuucauagacgucuucguacacuuuggaauagcacaaagcagcacaagaggaggaagcagaguagaaggaauauucgcaggacuauucaugaaugcauacggagccggacaaguaaugcuaagauggggaguuuuagcaaaaagcguaaaaaacauaauguuaggacacgccuccguccaagccgaaauggaacaaguaguagaaguauacgaauaugcacaaaaacuaggaggagaagcaggauucuaucacauacucaauaacccaaaagcaucacuauugagcuuaacacaauucccacauuuuucauccguaguccuaggaaaugcagcaggcuuaggaauaaugggagaauacagaggcacaccaagaaaucaagacuuauacgaugcagcaaaagcauacgcagaacaacuaaaagaaaacggaguaauaaacuacucaguauuagauuuaacagcagaagaauuagaagcaauaaaacaucaacuaaauccuaaggauaaugauguagaacucuaaggacuagugaagggaacacccaaauuuaauucagccuuaagcacaauuaauuaagagugaaacguaauuguacaagcaguuggucacccaccauagggcaugaucaacaccgcaaccuuuccuuuuucccccagugauucugaaaaaccccucuucccuucagcuugcuuagauguuccaaauuuaguaagcuuaaggcggccuacagaagaaaaagaaaaaaaaggccacaaaaguucccucucacuuucaguaaauaaaauaaaagcagcaacagaaauaaagaaauaaaugaaauucaaaaugaaauaaauauuguguugugcagcauuaaaaaaucaauaaaaauuaaaaaugagcaagaucuaaaaaaaaaaaaaaaaaaaaaaaaaaaaaaaaaaaaaaaaaaaaaaaaaaaaaaaaaaaaaaaaugcaucccccccccccccccccccccccccccccccaaaggcucuuuucagagccaccagaauu

SEQ ID NO: 20493 - RNA, 1767 nt, Artificial Sequence
  mRNA product Design g-3 comprising derived and/or modified sequence from HRSV(Memphis-37)__AIY60635.1__N (opt11)
gggagaguccgcucagccagguugcagaagcggcuuagcguguguccuaaucuucucucugcguguagguaggccugugccgcaaacaagcuuaccauggcccuaagcaaagucaaacucaacgacacacuaaacaaagaccaacuccucagcuccagcaaauacaccauccaacgauccaccggcgacuccauagacacccccaacuacgacguccaaaaacacaucaacaaacuaugcggcaugcuccuaaucacagaagacgccaaccacaaauucaccggagucaucggcaugcucuacgccaugagccgccucggccgagaagacacaaucaaaauacuaagagacgccggcuaccacguaaaagccaacggcguagacguaaccacccaccgccaagacaucaacggcaaagaaaugaaauucgaaguucucacccucgccucacuaaccacggaaauccaaauaaacauugaaaucgaaagcagaaaauccuacaaaaagaugcuaaaagaaaugggcgagguagccccagaauaccgccacgacagccccgacugcggaaugaucauccucugcauugcagcccucgucaucaccaaacuagccgccggcgacagaagcggccuaaccgcaguaauccgccgagccaacaacguacucaaaaacgaaaugaaacgcuacaaaggccuccuccccaaagacaucgccaacagcuucuacgaaguauucgaaaaauacccgcacuucaucgacgucuucguacacuucggcauagcccaaagcagcacacgaggcggcucccgcgucgaaggaauauucgccggccuguucaugaacgcauacggagcgggccaagucaugcuccgcugggguguacuagccaaguccgucaaaaacaucaugcuagggcacgcaagcguacaagccgaaauggaacaaguagucgaagucuacgaauacgcacaaaaacuaggcggcgaagccggcuucuaccacauccuaaacaaccccaaagccucauuacucucccucacccaauuuccucacuucuccagcgucguccucggaaacgccgccggccuaggcauaaugggggaauaccgcggcaccccgcgcaaccaagaccucuacgacgcagcaaaagccuacgcagaacaacuaaaagaaaacggagucaucaacuacagcguacuggaccuaaccgccgaagaacucgaagccauaaaacaccaacucaaccccaaagacaacgacgucgagcucuaaggacuagugaagggaacacccaaauuuaauucagccuuaagcacaauuaauuaagagugaaacguaauuguacaagcaguuggucacccaccauagggcaugaucaacaccgcaaccuuuccuuuuucccccagugauucugaaaaaccccucuucccuucagcuugcuuagauguuccaaauuuaguaagcuuaaggcggccuacagaagaaaaagaaaaaaaaggccacaaaaguucccucucacuuucaguaaauaaaauaaaagcagcaacagaaauaaagaaauaaaugaaauucaaaaugaaauaaauauuguguugugcagcauuaaaaaaucaauaaaaauuaaaaaugagcaagaucuaaaaaaaaaaaaaaaaaaaaaaaaaaaaaaaaaaaaaaaaaaaaaaaaaaaaaaaaaaaaaaaaugcaucccccccccccccccccccccccccccccccaaaggcucuuuucagagccaccagaauu

SEQ ID NO: 20494 - RNA, 1562 nt, Artificial Sequence
  mRNA product Design g-4 comprising derived and/or modified sequence from HRSV(Memphis-37)__AIY60635.1__N (wt)
gggagacuccugucgggcggaaguaggaggaguagaguuuaaaaacaguacucuuuuuccgguucgggacguaguugaagcaacgacaagccggauaaccgcucuugagacaggaagcuuaccauggcucuuagcaaagucaaguugaacgauacacucaacaaagaucaacuucugucauccagcaaauacaccauccaacggagcacaggagauaguauugauacuccuaauuaugaugugcagaaacacaucaacaaguuauguggcauguuauuaaucacagaagaugcuaaucauaaauucacugggguaauagguauguuauaugcuaugucuagauuaggaagagaagacaccauaaaaauacucagagaugcgggauaucauguaaaagcaaauggaguggauguaacaacacaucgucaagacauuaauggaaaagaaaugaaauuugaaguguuaacauuggcaagcuuaacaacugaaauucaaaucaacauugagauagaaucuaggaaauccuacaaaaaaaugcuaaaagaaaugggagagguggcuccagaauacaggcaugacucuccugauuguggaaugauaauauuauguauagcagcauuaguaauaaccaaauuagcagcaggggauagaucuggucuuacugcugugauuaggagagcuaauaauguucuaaaaaaugaaaugaaacguuauaaaggcuuacuaccaaaggauauagccaacagcuucuaugaaguguuugaaaaauauccucacuuuauagauguuuuuguucauuuugguauagcacaaucuucuaccagagguggcaguagaguugaagggauuuuugcaggauuguuuaugaaugccuauggugcagggcaagugauguuacgguggggagucuuagcaaaaucaguuaaaaauauuaugcuaggacaugcuagugugcaagcagaaauggaacaaguuguggaaguuuaugaauaugcccaaaaauuggguggagaagcaggauucuaccauauauugaacaauccaaaagcaucauuauuaucuuugacucaauuuccccacuucuccaguguaguauugggcaaugcugcuggccuaggcauaaugggagaauacagagguacaccaaggaaucaagaucuauaugaugcugcaaaggcauaugcugaacaacucaaagaaaauggugugauuaacuacaguguauuagacuugacagcagaagaacuagaggcuaucaaacaucagcuuaauccaaaagauaaugauguagagcuuugaggacuaguaauaaggaaacuguaugaaugucugugggcaggaagugaagagauccuucuguaaagguuuuuggaauuaugucugcugaauaauaaacuuuuuugaaauaauaaaucugguagaaaaaugagaucuaaaaaaaaaaaaaaaaaaaaaaaaaaaaaaaaaaaaaaaaaaaaaaaaaaaaaaaaaaaaaaaaugcaucccccccccccccccccccccccccccccccaaaggcucuuuucagagccaccagaauu

SEQ ID NO: 20495 - RNA, 1562 nt, Artificial Sequence
  mRNA product Design g-4 comprising derived and/or modified sequence from HRSV(Memphis-37)__AIY60635.1__N (opt1)
gggagacuccugucgggcggaaguaggaggaguagaguuuaaaaacaguacucuuuuuccgguucgggacguaguugaagcaacgacaagccggauaaccgcucuugagacaggaagcuuaccauggcccugagcaaggugaagcucaacgacacccugaacaaggaccagcugcucuccagcuccaaguacaccauccagcgcagcaccggcgacuccaucgacacccccaacuacgacguccagaagcacaucaacaagcugugcgggaugcugcucaucaccgaggacgccaaccacaaguucaccggcgugaucgggaugcuguacgcgaugagccggcugggccgcgaggacacgaucaagauccuccgggacgccggguaccacgugaaggccaacggcgucgacgugaccacccaccgccaggacaucaacggcaaggagaugaaguucgaggugcugacccuggccucccucacgaccgagauccagaucaacaucgagaucgagagccggaaguccuacaagaagaugcugaaggagaugggggaggucgccccggaguaccgccacgacagccccgacugcggcaugaucauccugugcaucgcggcccucgugaucaccaagcuggccgccggggaccgguccggccugaccgcggugauccgccgggccaacaacguccucaagaacgagaugaagcgcuacaaggggcugcugcccaaggacaucgccaacagcuucuacgagguguucgagaaguacccccacuucaucgacguguucguccacuucggcaucgcccaguccagcacgcggggcgggucccgcguggagggcaucuucgccgggcuguucaugaacgcguacggcgccggccaggugaugcugcgguggggcguccuggccaagagcgugaagaacaucaugcucgggcacgccuccgugcaggccgagauggagcaggucguggagguguacgaguacgcgcagaagcucgggggcgaggccggguucuaccacauccugaacaacccgaaggccagccuccugucccugacccaguucccccacuucagcagcgucgugcucggcaacgccgccggccuggggaucaugggcgaguaccgcgggacgccccggaaccaggaccuguacgacgcggccaaggccuacgccgagcagcucaaggagaacggcgugaucaacuacuccguccuggaccugaccgccgaggagcucgaggcgaucaagcaccagcugaaccccaaggacaacgacguggagcugugaggacuaguaauaaggaaacuguaugaaugucugugggcaggaagugaagagauccuucuguaaagguuuuuggaauuaugucugcugaauaauaaacuuuuuugaaauaauaaaucugguagaaaaaugagaucuaaaaaaaaaaaaaaaaaaaaaaaaaaaaaaaaaaaaaaaaaaaaaaaaaaaaaaaaaaaaaaaaugcaucccccccccccccccccccccccccccccccaaaggcucuuuucagagccaccagaauu

SEQ ID NO: 20496 - RNA, 1562 nt, Artificial Sequence
  mRNA product Design g-4 comprising derived and/or modified sequence from HRSV(Memphis-37)__AIY60635.1__N (opt2)
gggagacuccugucgggcggaaguaggaggaguagaguuuaaaaacaguacucuuuuuccgguucgggacguaguugaagcaacgacaagccggauaaccgcucuugagacaggaagcuuaccauggcccucuccaaggucaagcucaacgacacccucaacaaggaccagcuccucuccuccuccaaguacaccauccagcgcuccaccggcgacuccaucgacacccccaacuacgacguccagaagcacaucaacaagcucugcggcaugcuccucaucaccgaggacgccaaccacaaguucaccggcgucaucggcaugcucuacgccaugucccgccucggccgcgaggacaccaucaagauccuccgcgacgccggcuaccacgucaaggccaacggcgucgacgucaccacccaccgccaggacaucaacggcaaggagaugaaguucgagguccucacccucgccucccucaccaccgagauccagaucaacaucgagaucgagucccgcaaguccuacaagaagaugcucaaggagaugggcgaggucgcccccgaguaccgccacgacucccccgacugcggcaugaucauccucugcaucgccgcccucgucaucaccaagcucgccgccggcgaccgcuccggccucaccgccgucauccgccgcgccaacaacguccucaagaacgagaugaagcgcuacaagggccuccuccccaaggacaucgccaacuccuucuacgaggucuucgagaaguacccccacuucaucgacgucuucguccacuucggcaucgcccaguccuccacccgcggcggcucccgcgucgagggcaucuucgccggccucuucaugaacgccuacggcgccggccaggucaugcuccgcuggggcguccucgccaaguccgucaagaacaucaugcucggccacgccuccguccaggccgagauggagcaggucgucgaggucuacgaguacgcccagaagcucggcggcgaggccggcuucuaccacauccucaacaaccccaaggccucccuccucucccucacccaguucccccacuucuccuccgucguccucggcaacgccgccggccucggcaucaugggcgaguaccgcggcaccccccgcaaccaggaccucuacgacgccgccaaggccuacgccgagcagcucaaggagaacggcgucaucaacuacuccguccucgaccucaccgccgaggagcucgaggccaucaagcaccagcucaaccccaaggacaacgacgucgagcucugaggacuaguaauaaggaaacuguaugaaugucugugggcaggaagugaagagauccuucuguaaagguuuuuggaauuaugucugcugaauaauaaacuuuuuugaaauaauaaaucugguagaaaaaugagaucuaaaaaaaaaaaaaaaaaaaaaaaaaaaaaaaaaaaaaaaaaaaaaaaaaaaaaaaaaaaaaaaaugcaucccccccccccccccccccccccccccccccaaaggcucuuuucagagccaccagaauu

SEQ ID NO: 20497 - RNA, 1562 nt, Artificial Sequence
  mRNA product Design g-4 comprising derived and/or modified sequence from HRSV(Memphis-37)__AIY60635.1__N (opt3)
gggagacuccugucgggcggaaguaggaggaguagaguuuaaaaacaguacucuuuuuccgguucgggacguaguugaagcaacgacaagccggauaaccgcucuugagacaggaagcuuaccauggcccugagcaaggugaaacucaacgacacccuuaauaaggaucagcuguuguccucuucaaaauacacaauccaaagaaguacuggcgacagcauugauacgcccaacuaugacguccagaagcacauaaauaaauuaugcgggaugcugcuaaucaccgaggaugcuaaccauaaguucacaggaguuauugguaugcucuacgcaauguccaggcugggccgggaagacacuaucaagauucuucgcgaugccggguaucacgugaaagcgaauggaguagacgugaccacacaucgacaggauaucaacggcaaggagaugaaauuugaaguccugaccuuggcuucucucacuacagagauacagaucaauauugaaaucgagucgcguaagucauacaaaaagaugcugaaggagaugggugaaguggccccugaguauagacacgacagcccagauugugggaugauuauccugugcauagcagcccucguuauuaccaaauuagcugcaggagacaggaguggccugacggccgugauccggcgcgcuaacaauguccuuaagaacgaaaugaaaagauacaagggcuugcugccgaaagauauugccaauuccuucuaugagguguuugagaaguacccccauuucaucgacguauuuguucacuucgggaucgcgcaaucuagcacuaggggagguucccggguggaaggcauuuuugcagggcuauucaugaacgccuacggagcuggccaggucaugcuccgcuggggugugcuggccaaaucagugaagaauauaaugcuugggcacgcaaguguccaggcugagauggaacagguuguggagguauaugaauacgcccaaaagcugggaggcgaggcgggcuuuuaucauaucuugaacaauccuaaagccagccuccugucuuuaacccaguucccacacuuuuccucagugguccuggggaacgcagcuggacucgguauuaugggcgaguaccgagggacacccagaaaccaggaccuuuaugaugccgcuaaggccuacgcagaacagcugaaagagaauggagugaucaacuauagcguuuuggaccuaacugccgaggaacuggaagcuauaaagcaucaacucaauccuaaagauaacgacguggagcugugaggacuaguaauaaggaaacuguaugaaugucugugggcaggaagugaagagauccuucuguaaagguuuuuggaauuaugucugcugaauaauaaacuuuuuugaaauaauaaaucugguagaaaaaugagaucuaaaaaaaaaaaaaaaaaaaaaaaaaaaaaaaaaaaaaaaaaaaaaaaaaaaaaaaaaaaaaaaaugcaucccccccccccccccccccccccccccccccaaaggcucuuuucagagccaccagaauu

SEQ ID NO: 20498 - RNA, 1562 nt, Artificial Sequence
  mRNA product Design g-4 comprising derived and/or modified sequence from HRSV(Memphis-37)__AIY60635.1__N (opt4)
gggagacuccugucgggcggaaguaggaggaguagaguuuaaaaacaguacucuuuuuccgguucgggacguaguugaagcaacgacaagccggauaaccgcucuugagacaggaagcuuaccauggcccugagcaaggugaagcugaacgacacccugaacaaggaccagcugcugagcagcagcaaguacaccauccagagaagcaccggcgacagcaucgacacccccaacuacgacgugcagaagcacaucaacaagcugugcggcaugcugcugaucaccgaggacgccaaccacaaguucaccggcgugaucggcaugcuguacgccaugagcagacugggcagagaggacaccaucaagauccugagagacgccggcuaccacgugaaggccaacggcguggacgugaccacccacagacaggacaucaacggcaaggagaugaaguucgaggugcugacccuggccagccugaccaccgagauccagaucaacaucgagaucgagagcagaaagagcuacaagaagaugcugaaggagaugggcgagguggcccccgaguacagacacgacagccccgacugcggcaugaucauccugugcaucgccgcccuggugaucaccaagcuggccgccggcgacagaagcggccugaccgccgugaucagaagagccaacaacgugcugaagaacgagaugaagagauacaagggccugcugcccaaggacaucgccaacagcuucuacgagguguucgagaaguacccccacuucaucgacguguucgugcacuucggcaucgcccagagcagcaccagaggcggcagcagaguggagggcaucuucgccggccuguucaugaacgccuacggcgccggccaggugaugcugagauggggcgugcuggccaagagcgugaagaacaucaugcugggccacgccagcgugcaggccgagauggagcaggugguggagguguacgaguacgcccagaagcugggcggcgaggccggcuucuaccacauccugaacaaccccaaggccagccugcugagccugacccaguucccccacuucagcagcguggugcugggcaacgccgccggccugggcaucaugggcgaguacagaggcacccccagaaaccaggaccuguacgacgccgccaaggccuacgccgagcagcugaaggagaacggcgugaucaacuacagcgugcuggaccugaccgccgaggagcuggaggccaucaagcaccagcugaaccccaaggacaacgacguggagcugugaggacuaguaauaaggaaacuguaugaaugucugugggcaggaagugaagagauccuucuguaaagguuuuuggaauuaugucugcugaauaauaaacuuuuuugaaauaauaaaucugguagaaaaaugagaucuaaaaaaaaaaaaaaaaaaaaaaaaaaaaaaaaaaaaaaaaaaaaaaaaaaaaaaaaaaaaaaaaugcaucccccccccccccccccccccccccccccccaaaggcucuuuucagagccaccagaauu

SEQ ID NO: 20499 - RNA, 1562 nt, Artificial Sequence
  mRNA product Design g-4 comprising derived and/or modified sequence from HRSV(Memphis-37)__AIY60635.1__N (opt5)
gggagacuccugucgggcggaaguaggaggaguagaguuuaaaaacaguacucuuuuuccgguucgggacguaguugaagcaacgacaagccggauaaccgcucuugagacaggaagcuuaccauggcccugagcaaggugaaacucaacgacacccugaauaaggaucagcuucuguccucuagcaaauacacaauccaaagauccacgggcgacucuauugauacccccaacuaugacguccagaagcacaucaauaaacucugcgggaugcugcuuauuacagaggaugcuaaccauaaguucaccggaguuaucggcaugcuguacgccaugagccggcucgggcgcgaagacacaauuaagauccugagagaugcgggauaucacgugaaagcuaauggcguggacgucaccacacaucggcaggauaucaacgggaaggagaugaaauuugaagugcugacccucgccucccugacgaccgagauucagaucaauauugaaaucgagucucgcaagagcuacaaaaagaugcuuaaggagaugggagaaguugccccugaguauagacacgacuccccggauuguggcaugauuauccugugcauugcugcccucgugaucacaaaacuggcugccggcgaccggagcgggcuuaccgcggucauccgcagagccaacaaugugcugaagaacgaaaugaaacgguacaagggacuccugcccaaagauauugcuaauucuuucuaugagguuuuugagaaguacccucauuucaucgacguguuuguccacuucggcauugcccaauccagcacacgcgggggaucuagaguggaaggcaucuuugcugggcuguucaugaacgccuacggagcgggccaggugaugcuccgguggggcguccuggccaaauccguuaagaauauuaugcuugggcacgcuagcgugcaggccgagauggaacagguggucgagguguaugaauacgcucaaaagcugggaggcgaggccggguuuuaucauauccucaacaaucccaaagccucucugcuuucccugacccaguucccucacuuuagcuccguugugcucggaaacgcugcgggccuggggaucaugggagaguaccgcggcacgcccagaaaccaggaccuguaugaugccgcuaaggccuacgccgaacagcucaaagagaauggcgucauuaacuauucugugcuggaccuuacagcugaggaacuggaagccaucaagcaucaacucaauccuaaagauaacgacguugagcugugaggacuaguaauaaggaaacuguaugaaugucugugggcaggaagugaagagauccuucuguaaagguuuuuggaauuaugucugcugaauaauaaacuuuuuugaaauaauaaaucugguagaaaaaugagaucuaaaaaaaaaaaaaaaaaaaaaaaaaaaaaaaaaaaaaaaaaaaaaaaaaaaaaaaaaaaaaaaaugcaucccccccccccccccccccccccccccccccaaaggcucuuuucagagccaccagaauu

SEQ ID NO: 20500 - RNA, 1562 nt, Artificial Sequence
  mRNA product Design g-4 comprising derived and/or modified sequence from HRSV(Memphis-37)__AIY60635.1__N (opt6)
gggagacuccugucgggcggaaguaggaggaguagaguuuaaaaacaguacucuuuuuccgguucgggacguaguugaagcaacgacaagccggauaaccgcucuugagacaggaagcuuaccauggccuuaaguaaaguaaaauuaaacgacacacuaaacaaagaccaauuacucucaucaucgaaauauacaauacaaagauccacaggagacuccauagauacaccaaauuacgacguacaaaaacauauaaacaaacucugcggaauguuauuaauaacagaagacgcaaaccacaaauucacaggagucauagguaugcuauacgcaaugucaagauuaggaagagaagauacaauaaaaauacuaagagacgcaggauaccacguaaaagcaaacggaguagacguaacaacacauagacaagauauaaacgguaaagaaaugaaauucgaaguacuaacacuagccagucuaacaacagaaauacaaauaaacauagaaauagaaagccgaaaaucauacaaaaaaauguuaaaagaaaugggggaaguagcacccgaauacagacaugauucaccugacugcggaaugauaauacucugcauagcggcauuagucauaacaaaacuagccgcaggagacagaagcggauuaacagcaguaauaagaagagcaaauaauguauuaaaaaaugaaaugaaaagguauaaaggauuacuaccaaaagauauagcaaacucauucuaugaaguuuucgaaaaauacccacacuucauagacgucuucguacacuuuggaauagcacaaagcagcacaagaggaggaagcagaguagaaggaauauucgcaggacuauucaugaaugcauacggagccggacaaguaaugcuaagauggggaguuuuagcaaaaagcguaaaaaacauaauguuaggacacgccuccguccaagccgaaauggaacaaguaguagaaguauacgaauaugcacaaaaacuaggaggagaagcaggauucuaucacauacucaauaacccaaaagcaucacuauugagcuuaacacaauucccacauuuuucauccguaguccuaggaaaugcagcaggcuuaggaauaaugggagaauacagaggcacaccaagaaaucaagacuuauacgaugcagcaaaagcauacgcagaacaacuaaaagaaaacggaguaauaaacuacucaguauuagauuuaacagcagaagaauuagaagcaauaaaacaucaacuaaauccuaaggauaaugauguagaacucuaaggacuaguaauaaggaaacuguaugaaugucugugggcaggaagugaagagauccuucuguaaagguuuuuggaauuaugucugcugaauaauaaacuuuuuugaaauaauaaaucugguagaaaaaugagaucuaaaaaaaaaaaaaaaaaaaaaaaaaaaaaaaaaaaaaaaaaaaaaaaaaaaaaaaaaaaaaaaaugcaucccccccccccccccccccccccccccccccaaaggcucuuuucagagccaccagaauu

SEQ ID NO: 20501 - RNA, 1562 nt, Artificial Sequence
  mRNA product Design g-4 comprising derived and/or modified sequence from HRSV(Memphis-37)__AIY60635.1__N (opt11)
gggagacuccugucgggcggaaguaggaggaguagaguuuaaaaacaguacucuuuuuccgguucgggacguaguugaagcaacgacaagccggauaaccgcucuugagacaggaagcuuaccauggcccuaagcaaagucaaacucaacgacacacuaaacaaagaccaacuccucagcuccagcaaauacaccauccaacgauccaccggcgacuccauagacacccccaacuacgacguccaaaaacacaucaacaaacuaugcggcaugcuccuaaucacagaagacgccaaccacaaauucaccggagucaucggcaugcucuacgccaugagccgccucggccgagaagacacaaucaaaauacuaagagacgccggcuaccacguaaaagccaacggcguagacguaaccacccaccgccaagacaucaacggcaaagaaaugaaauucgaaguucucacccucgccucacuaaccacggaaauccaaauaaacauugaaaucgaaagcagaaaauccuacaaaaagaugcuaaaagaaaugggcgagguagccccagaauaccgccacgacagccccgacugcggaaugaucauccucugcauugcagcccucgucaucaccaaacuagccgccggcgacagaagcggccuaaccgcaguaauccgccgagccaacaacguacucaaaaacgaaaugaaacgcuacaaaggccuccuccccaaagacaucgccaacagcuucuacgaaguauucgaaaaauacccgcacuucaucgacgucuucguacacuucggcauagcccaaagcagcacacgaggcggcucccgcgucgaaggaauauucgccggccuguucaugaacgcauacggagcgggccaagucaugcuccgcugggguguacuagccaaguccgucaaaaacaucaugcuagggcacgcaagcguacaagccgaaauggaacaaguagucgaagucuacgaauacgcacaaaaacuaggcggcgaagccggcuucuaccacauccuaaacaaccccaaagccucauuacucucccucacccaauuuccucacuucuccagcgucguccucggaaacgccgccggccuaggcauaaugggggaauaccgcggcaccccgcgcaaccaagaccucuacgacgcagcaaaagccuacgcagaacaacuaaaagaaaacggagucaucaacuacagcguacuggaccuaaccgccgaagaacucgaagccauaaaacaccaacucaaccccaaagacaacgacgucgagcucuaaggacuaguaauaaggaaacuguaugaaugucugugggcaggaagugaagagauccuucuguaaagguuuuuggaauuaugucugcugaauaauaaacuuuuuugaaauaauaaaucugguagaaaaaugagaucuaaaaaaaaaaaaaaaaaaaaaaaaaaaaaaaaaaaaaaaaaaaaaaaaaaaaaaaaaaaaaaaaugcaucccccccccccccccccccccccccccccccaaaggcucuuuucagagccaccagaauu

SEQ ID NO: 20502 - RNA, 1538 nt, Artificial Sequence
  mRNA product Design g-5 comprising derived and/or modified sequence from HRSV(Memphis-37)__AIY60635.1__N (wt)
gggagacccgugacccggaaguuguacggcuacgcgacuuucccucccacaaacccucgcgcccuuccuuuccuacuugggcccggcagaaagcuuaccauggcucuuagcaaagucaaguugaacgauacacucaacaaagaucaacuucugucauccagcaaauacaccauccaacggagcacaggagauaguauugauacuccuaauuaugaugugcagaaacacaucaacaaguuauguggcauguuauuaaucacagaagaugcuaaucauaaauucacugggguaauagguauguuauaugcuaugucuagauuaggaagagaagacaccauaaaaauacucagagaugcgggauaucauguaaaagcaaauggaguggauguaacaacacaucgucaagacauuaauggaaaagaaaugaaauuugaaguguuaacauuggcaagcuuaacaacugaaauucaaaucaacauugagauagaaucuaggaaauccuacaaaaaaaugcuaaaagaaaugggagagguggcuccagaauacaggcaugacucuccugauuguggaaugauaauauuauguauagcagcauuaguaauaaccaaauuagcagcaggggauagaucuggucuuacugcugugauuaggagagcuaauaauguucuaaaaaaugaaaugaaacguuauaaaggcuuacuaccaaaggauauagccaacagcuucuaugaaguguuugaaaaauauccucacuuuauagauguuuuuguucauuuugguauagcacaaucuucuaccagagguggcaguagaguugaagggauuuuugcaggauuguuuaugaaugccuauggugcagggcaagugauguuacgguggggagucuuagcaaaaucaguuaaaaauauuaugcuaggacaugcuagugugcaagcagaaauggaacaaguuguggaaguuuaugaauaugcccaaaaauuggguggagaagcaggauucuaccauauauugaacaauccaaaagcaucauuauuaucuuugacucaauuuccccacuucuccaguguaguauugggcaaugcugcuggccuaggcauaaugggagaauacagagguacaccaaggaaucaagaucuauaugaugcugcaaaggcauaugcugaacaacucaaagaaaauggugugauuaacuacaguguauuagacuugacagcagaagaacuagaggcuaucaaacaucagcuuaauccaaaagauaaugauguagagcuuugaggacuaguaauaaggaaacuguaugaaugucugugggcaggaagugaagagauccuucuguaaagguuuuuggaauuaugucugcugaauaauaaacuuuuuugaaauaauaaaucugguagaaaaaugagaucuaaaaaaaaaaaaaaaaaaaaaaaaaaaaaaaaaaaaaaaaaaaaaaaaaaaaaaaaaaaaaaaaugcaucccccccccccccccccccccccccccccccaaaggcucuuuucagagccaccagaauu

SEQ ID NO: 20503 - RNA, 1538 nt, Artificial Sequence
  mRNA product Design g-5 comprising derived and/or modified sequence from HRSV(Memphis-37)__AIY60635.1__N (opt1)
gggagacccgugacccggaaguuguacggcuacgcgacuuucccucccacaaacccucgcgcccuuccuuuccuacuugggcccggcagaaagcuuaccauggcccugagcaaggugaagcucaacgacacccugaacaaggaccagcugcucuccagcuccaaguacaccauccagcgcagcaccggcgacuccaucgacacccccaacuacgacguccagaagcacaucaacaagcugugcgggaugcugcucaucaccgaggacgccaaccacaaguucaccggcgugaucgggaugcuguacgcgaugagccggcugggccgcgaggacacgaucaagauccuccgggacgccggguaccacgugaaggccaacggcgucgacgugaccacccaccgccaggacaucaacggcaaggagaugaaguucgaggugcugacccuggccucccucacgaccgagauccagaucaacaucgagaucgagagccggaaguccuacaagaagaugcugaaggagaugggggaggucgccccggaguaccgccacgacagccccgacugcggcaugaucauccugugcaucgcggcccucgugaucaccaagcuggccgccggggaccgguccggccugaccgcggugauccgccgggccaacaacguccucaagaacgagaugaagcgcuacaaggggcugcugcccaaggacaucgccaacagcuucuacgagguguucgagaaguacccccacuucaucgacguguucguccacuucggcaucgcccaguccagcacgcggggcgggucccgcguggagggcaucuucgccgggcuguucaugaacgcguacggcgccggccaggugaugcugcgguggggcguccuggccaagagcgugaagaacaucaugcucgggcacgccuccgugcaggccgagauggagcaggucguggagguguacgaguacgcgcagaagcucgggggcgaggccggguucuaccacauccugaacaacccgaaggccagccuccugucccugacccaguucccccacuucagcagcgucgugcucggcaacgccgccggccuggggaucaugggcgaguaccgcgggacgccccggaaccaggaccuguacgacgcggccaaggccuacgccgagcagcucaaggagaacggcgugaucaacuacuccguccuggaccugaccgccgaggagcucgaggcgaucaagcaccagcugaaccccaaggacaacgacguggagcugugaggacuaguaauaaggaaacuguaugaaugucugugggcaggaagugaagagauccuucuguaaagguuuuuggaauuaugucugcugaauaauaaacuuuuuugaaauaauaaaucugguagaaaaaugagaucuaaaaaaaaaaaaaaaaaaaaaaaaaaaaaaaaaaaaaaaaaaaaaaaaaaaaaaaaaaaaaaaaugcaucccccccccccccccccccccccccccccccaaaggcucuuuucagagccaccagaauu

SEQ ID NO: 20504 - RNA, 1538 nt, Artificial Sequence
  mRNA product Design g-5 comprising derived and/or modified sequence from HRSV(Memphis-37)__AIY60635.1__N (opt2)
gggagacccgugacccggaaguuguacggcuacgcgacuuucccucccacaaacccucgcgcccuuccuuuccuacuugggcccggcagaaagcuuaccauggcccucuccaaggucaagcucaacgacacccucaacaaggaccagcuccucuccuccuccaaguacaccauccagcgcuccaccggcgacuccaucgacacccccaacuacgacguccagaagcacaucaacaagcucugcggcaugcuccucaucaccgaggacgccaaccacaaguucaccggcgucaucggcaugcucuacgccaugucccgccucggccgcgaggacaccaucaagauccuccgcgacgccggcuaccacgucaaggccaacggcgucgacgucaccacccaccgccaggacaucaacggcaaggagaugaaguucgagguccucacccucgccucccucaccaccgagauccagaucaacaucgagaucgagucccgcaaguccuacaagaagaugcucaaggagaugggcgaggucgcccccgaguaccgccacgacucccccgacugcggcaugaucauccucugcaucgccgcccucgucaucaccaagcucgccgccggcgaccgcuccggccucaccgccgucauccgccgcgccaacaacguccucaagaacgagaugaagcgcuacaagggccuccuccccaaggacaucgccaacuccuucuacgaggucuucgagaaguacccccacuucaucgacgucuucguccacuucggcaucgcccaguccuccacccgcggcggcucccgcgucgagggcaucuucgccggccucuucaugaacgccuacggcgccggccaggucaugcuccgcuggggcguccucgccaaguccgucaagaacaucaugcucggccacgccuccguccaggccgagauggagcaggucgucgaggucuacgaguacgcccagaagcucggcggcgaggccggcuucuaccacauccucaacaaccccaaggccucccuccucucccucacccaguucccccacuucuccuccgucguccucggcaacgccgccggccucggcaucaugggcgaguaccgcggcaccccccgcaaccaggaccucuacgacgccgccaaggccuacgccgagcagcucaaggagaacggcgucaucaacuacuccguccucgaccucaccgccgaggagcucgaggccaucaagcaccagcucaaccccaaggacaacgacgucgagcucugaggacuaguaauaaggaaacuguaugaaugucugugggcaggaagugaagagauccuucuguaaagguuuuuggaauuaugucugcugaauaauaaacuuuuuugaaauaauaaaucugguagaaaaaugagaucuaaaaaaaaaaaaaaaaaaaaaaaaaaaaaaaaaaaaaaaaaaaaaaaaaaaaaaaaaaaaaaaaugcaucccccccccccccccccccccccccccccccaaaggcucuuuucagagccaccagaauu

SEQ ID NO: 20505 - RNA, 1538 nt, Artificial Sequence
  mRNA product Design g-5 comprising derived and/or modified sequence from HRSV(Memphis-37)__AIY60635.1__N (opt3)
gggagacccgugacccggaaguuguacggcuacgcgacuuucccucccacaaacccucgcgcccuuccuuuccuacuugggcccggcagaaagcuuaccauggcccugagcaaggugaaacucaacgacacccuuaauaaggaucagcuguuguccucuucaaaauacacaauccaaagaaguacuggcgacagcauugauacgcccaacuaugacguccagaagcacauaaauaaauuaugcgggaugcugcuaaucaccgaggaugcuaaccauaaguucacaggaguuauugguaugcucuacgcaauguccaggcugggccgggaagacacuaucaagauucuucgcgaugccggguaucacgugaaagcgaauggaguagacgugaccacacaucgacaggauaucaacggcaaggagaugaaauuugaaguccugaccuuggcuucucucacuacagagauacagaucaauauugaaaucgagucgcguaagucauacaaaaagaugcugaaggagaugggugaaguggccccugaguauagacacgacagcccagauugugggaugauuauccugugcauagcagcccucguuauuaccaaauuagcugcaggagacaggaguggccugacggccgugauccggcgcgcuaacaauguccuuaagaacgaaaugaaaagauacaagggcuugcugccgaaagauauugccaauuccuucuaugagguguuugagaaguacccccauuucaucgacguauuuguucacuucgggaucgcgcaaucuagcacuaggggagguucccggguggaaggcauuuuugcagggcuauucaugaacgccuacggagcuggccaggucaugcuccgcuggggugugcuggccaaaucagugaagaauauaaugcuugggcacgcaaguguccaggcugagauggaacagguuguggagguauaugaauacgcccaaaagcugggaggcgaggcgggcuuuuaucauaucuugaacaauccuaaagccagccuccugucuuuaacccaguucccacacuuuuccucagugguccuggggaacgcagcuggacucgguauuaugggcgaguaccgagggacacccagaaaccaggaccuuuaugaugccgcuaaggccuacgcagaacagcugaaagagaauggagugaucaacuauagcguuuuggaccuaacugccgaggaacuggaagcuauaaagcaucaacucaauccuaaagauaacgacguggagcugugaggacuaguaauaaggaaacuguaugaaugucugugggcaggaagugaagagauccuucuguaaagguuuuuggaauuaugucugcugaauaauaaacuuuuuugaaauaauaaaucugguagaaaaaugagaucuaaaaaaaaaaaaaaaaaaaaaaaaaaaaaaaaaaaaaaaaaaaaaaaaaaaaaaaaaaaaaaaaugcaucccccccccccccccccccccccccccccccaaaggcucuuuucagagccaccagaauu

SEQ ID NO: 20506 - RNA, 1538 nt, Artificial Sequence
  mRNA product Design g-5 comprising derived and/or modified sequence from HRSV(Memphis-37)__AIY60635.1__N (opt4)
gggagacccgugacccggaaguuguacggcuacgcgacuuucccucccacaaacccucgcgcccuuccuuuccuacuugggcccggcagaaagcuuaccauggcccugagcaaggugaagcugaacgacacccugaacaaggaccagcugcugagcagcagcaaguacaccauccagagaagcaccggcgacagcaucgacacccccaacuacgacgugcagaagcacaucaacaagcugugcggcaugcugcugaucaccgaggacgccaaccacaaguucaccggcgugaucggcaugcuguacgccaugagcagacugggcagagaggacaccaucaagauccugagagacgccggcuaccacgugaaggccaacggcguggacgugaccacccacagacaggacaucaacggcaaggagaugaaguucgaggugcugacccuggccagccugaccaccgagauccagaucaacaucgagaucgagagcagaaagagcuacaagaagaugcugaaggagaugggcgagguggcccccgaguacagacacgacagccccgacugcggcaugaucauccugugcaucgccgcccuggugaucaccaagcuggccgccggcgacagaagcggccugaccgccgugaucagaagagccaacaacgugcugaagaacgagaugaagagauacaagggccugcugcccaaggacaucgccaacagcuucuacgagguguucgagaaguacccccacuucaucgacguguucgugcacuucggcaucgcccagagcagcaccagaggcggcagcagaguggagggcaucuucgccggccuguucaugaacgccuacggcgccggccaggugaugcugagauggggcgugcuggccaagagcgugaagaacaucaugcugggccacgccagcgugcaggccgagauggagcaggugguggagguguacgaguacgcccagaagcugggcggcgaggccggcuucuaccacauccugaacaaccccaaggccagccugcugagccugacccaguucccccacuucagcagcguggugcugggcaacgccgccggccugggcaucaugggcgaguacagaggcacccccagaaaccaggaccuguacgacgccgccaaggccuacgccgagcagcugaaggagaacggcgugaucaacuacagcgugcuggaccugaccgccgaggagcuggaggccaucaagcaccagcugaaccccaaggacaacgacguggagcugugaggacuaguaauaaggaaacuguaugaaugucugugggcaggaagugaagagauccuucuguaaagguuuuuggaauuaugucugcugaauaauaaacuuuuuugaaauaauaaaucugguagaaaaaugagaucuaaaaaaaaaaaaaaaaaaaaaaaaaaaaaaaaaaaaaaaaaaaaaaaaaaaaaaaaaaaaaaaaugcaucccccccccccccccccccccccccccccccaaaggcucuuuucagagccaccagaauu

SEQ ID NO: 20507 - RNA, 1538 nt, Artificial Sequence
  mRNA product Design g-5 comprising derived and/or modified sequence from HRSV(Memphis-37)__AIY60635.1__N (opt5)
gggagacccgugacccggaaguuguacggcuacgcgacuuucccucccacaaacccucgcgcccuuccuuuccuacuugggcccggcagaaagcuuaccauggcccugagcaaggugaaacucaacgacacccugaauaaggaucagcuucuguccucuagcaaauacacaauccaaagauccacgggcgacucuauugauacccccaacuaugacguccagaagcacaucaauaaacucugcgggaugcugcuuauuacagaggaugcuaaccauaaguucaccggaguuaucggcaugcuguacgccaugagccggcucgggcgcgaagacacaauuaagauccugagagaugcgggauaucacgugaaagcuaauggcguggacgucaccacacaucggcaggauaucaacgggaaggagaugaaauuugaagugcugacccucgccucccugacgaccgagauucagaucaauauugaaaucgagucucgcaagagcuacaaaaagaugcuuaaggagaugggagaaguugccccugaguauagacacgacuccccggauuguggcaugauuauccugugcauugcugcccucgugaucacaaaacuggcugccggcgaccggagcgggcuuaccgcggucauccgcagagccaacaaugugcugaagaacgaaaugaaacgguacaagggacuccugcccaaagauauugcuaauucuuucuaugagguuuuugagaaguacccucauuucaucgacguguuuguccacuucggcauugcccaauccagcacacgcgggggaucuagaguggaaggcaucuuugcugggcuguucaugaacgccuacggagcgggccaggugaugcuccgguggggcguccuggccaaauccguuaagaauauuaugcuugggcacgcuagcgugcaggccgagauggaacagguggucgagguguaugaauacgcucaaaagcugggaggcgaggccggguuuuaucauauccucaacaaucccaaagccucucugcuuucccugacccaguucccucacuuuagcuccguugugcucggaaacgcugcgggccuggggaucaugggagaguaccgcggcacgcccagaaaccaggaccuguaugaugccgcuaaggccuacgccgaacagcucaaagagaauggcgucauuaacuauucugugcuggaccuuacagcugaggaacuggaagccaucaagcaucaacucaauccuaaagauaacgacguugagcugugaggacuaguaauaaggaaacuguaugaaugucugugggcaggaagugaagagauccuucuguaaagguuuuuggaauuaugucugcugaauaauaaacuuuuuugaaauaauaaaucugguagaaaaaugagaucuaaaaaaaaaaaaaaaaaaaaaaaaaaaaaaaaaaaaaaaaaaaaaaaaaaaaaaaaaaaaaaaaugcaucccccccccccccccccccccccccccccccaaaggcucuuuucagagccaccagaauu

SEQ ID NO: 20508 - RNA, 1538 nt, Artificial Sequence
  mRNA product Design g-5 comprising derived and/or modified sequence from HRSV(Memphis-37)__AIY60635.1__N (opt6)
gggagacccgugacccggaaguuguacggcuacgcgacuuucccucccacaaacccucgcgcccuuccuuuccuacuugggcccggcagaaagcuuaccauggccuuaaguaaaguaaaauuaaacgacacacuaaacaaagaccaauuacucucaucaucgaaauauacaauacaaagauccacaggagacuccauagauacaccaaauuacgacguacaaaaacauauaaacaaacucugcggaauguuauuaauaacagaagacgcaaaccacaaauucacaggagucauagguaugcuauacgcaaugucaagauuaggaagagaagauacaauaaaaauacuaagagacgcaggauaccacguaaaagcaaacggaguagacguaacaacacauagacaagauauaaacgguaaagaaaugaaauucgaaguacuaacacuagccagucuaacaacagaaauacaaauaaacauagaaauagaaagccgaaaaucauacaaaaaaauguuaaaagaaaugggggaaguagcacccgaauacagacaugauucaccugacugcggaaugauaauacucugcauagcggcauuagucauaacaaaacuagccgcaggagacagaagcggauuaacagcaguaauaagaagagcaaauaauguauuaaaaaaugaaaugaaaagguauaaaggauuacuaccaaaagauauagcaaacucauucuaugaaguuuucgaaaaauacccacacuucauagacgucuucguacacuuuggaauagcacaaagcagcacaagaggaggaagcagaguagaaggaauauucgcaggacuauucaugaaugcauacggagccggacaaguaaugcuaagauggggaguuuuagcaaaaagcguaaaaaacauaauguuaggacacgccuccguccaagccgaaauggaacaaguaguagaaguauacgaauaugcacaaaaacuaggaggagaagcaggauucuaucacauacucaauaacccaaaagcaucacuauugagcuuaacacaauucccacauuuuucauccguaguccuaggaaaugcagcaggcuuaggaauaaugggagaauacagaggcacaccaagaaaucaagacuuauacgaugcagcaaaagcauacgcagaacaacuaaaagaaaacggaguaauaaacuacucaguauuagauuuaacagcagaagaauuagaagcaauaaaacaucaacuaaauccuaaggauaaugauguagaacucuaaggacuaguaauaaggaaacuguaugaaugucugugggcaggaagugaagagauccuucuguaaagguuuuuggaauuaugucugcugaauaauaaacuuuuuugaaauaauaaaucugguagaaaaaugagaucuaaaaaaaaaaaaaaaaaaaaaaaaaaaaaaaaaaaaaaaaaaaaaaaaaaaaaaaaaaaaaaaaugcaucccccccccccccccccccccccccccccccaaaggcucuuuucagagccaccagaauu

SEQ ID NO: 20509 - RNA, 1538 nt, Artificial Sequence
  mRNA product Design g-5 comprising derived and/or modified sequence from HRSV(Memphis-37)__AIY60635.1__N (opt11)
gggagacccgugacccggaaguuguacggcuacgcgacuuucccucccacaaacccucgcgcccuuccuuuccuacuugggcccggcagaaagcuuaccauggcccuaagcaaagucaaacucaacgacacacuaaacaaagaccaacuccucagcuccagcaaauacaccauccaacgauccaccggcgacuccauagacacccccaacuacgacguccaaaaacacaucaacaaacuaugcggcaugcuccuaaucacagaagacgccaaccacaaauucaccggagucaucggcaugcucuacgccaugagccgccucggccgagaagacacaaucaaaauacuaagagacgccggcuaccacguaaaagccaacggcguagacguaaccacccaccgccaagacaucaacggcaaagaaaugaaauucgaaguucucacccucgccucacuaaccacggaaauccaaauaaacauugaaaucgaaagcagaaaauccuacaaaaagaugcuaaaagaaaugggcgagguagccccagaauaccgccacgacagccccgacugcggaaugaucauccucugcauugcagcccucgucaucaccaaacuagccgccggcgacagaagcggccuaaccgcaguaauccgccgagccaacaacguacucaaaaacgaaaugaaacgcuacaaaggccuccuccccaaagacaucgccaacagcuucuacgaaguauucgaaaaauacccgcacuucaucgacgucuucguacacuucggcauagcccaaagcagcacacgaggcggcucccgcgucgaaggaauauucgccggccuguucaugaacgcauacggagcgggccaagucaugcuccgcugggguguacuagccaaguccgucaaaaacaucaugcuagggcacgcaagcguacaagccgaaauggaacaaguagucgaagucuacgaauacgcacaaaaacuaggcggcgaagccggcuucuaccacauccuaaacaaccccaaagccucauuacucucccucacccaauuuccucacuucuccagcgucguccucggaaacgccgccggccuaggcauaaugggggaauaccgcggcaccccgcgcaaccaagaccucuacgacgcagcaaaagccuacgcagaacaacuaaaagaaaacggagucaucaacuacagcguacuggaccuaaccgccgaagaacucgaagccauaaaacaccaacucaaccccaaagacaacgacgucgagcucuaaggacuaguaauaaggaaacuguaugaaugucugugggcaggaagugaagagauccuucuguaaagguuuuuggaauuaugucugcugaauaauaaacuuuuuugaaauaauaaaucugguagaaaaaugagaucuaaaaaaaaaaaaaaaaaaaaaaaaaaaaaaaaaaaaaaaaaaaaaaaaaaaaaaaaaaaaaaaaugcaucccccccccccccccccccccccccccccccaaaggcucuuuucagagccaccagaauu

SEQ ID NO: 20510 - RNA, 1554 nt, Artificial Sequence
  mRNA product Design h-1 comprising derived and/or modified sequence from HRSV(Memphis-37)__AIY60635.1__N (wt)
gggagacccgugacccggaaguuguacggcuacgcgacuuucccucccacaaacccucgcgcccuuccuuuccuacuugggcccggcagaaagcuuaccauggcucuuagcaaagucaaguugaacgauacacucaacaaagaucaacuucugucauccagcaaauacaccauccaacggagcacaggagauaguauugauacuccuaauuaugaugugcagaaacacaucaacaaguuauguggcauguuauuaaucacagaagaugcuaaucauaaauucacugggguaauagguauguuauaugcuaugucuagauuaggaagagaagacaccauaaaaauacucagagaugcgggauaucauguaaaagcaaauggaguggauguaacaacacaucgucaagacauuaauggaaaagaaaugaaauuugaaguguuaacauuggcaagcuuaacaacugaaauucaaaucaacauugagauagaaucuaggaaauccuacaaaaaaaugcuaaaagaaaugggagagguggcuccagaauacaggcaugacucuccugauuguggaaugauaauauuauguauagcagcauuaguaauaaccaaauuagcagcaggggauagaucuggucuuacugcugugauuaggagagcuaauaauguucuaaaaaaugaaaugaaacguuauaaaggcuuacuaccaaaggauauagccaacagcuucuaugaaguguuugaaaaauauccucacuuuauagauguuuuuguucauuuugguauagcacaaucuucuaccagagguggcaguagaguugaagggauuuuugcaggauuguuuaugaaugccuauggugcagggcaagugauguuacgguggggagucuuagcaaaaucaguuaaaaauauuaugcuaggacaugcuagugugcaagcagaaauggaacaaguuguggaaguuuaugaauaugcccaaaaauuggguggagaagcaggauucuaccauauauugaacaauccaaaagcaucauuauuaucuuugacucaauuuccccacuucuccaguguaguauugggcaaugcugcuggccuaggcauaaugggagaauacagagguacaccaaggaaucaagaucuauaugaugcugcaaaggcauaugcugaacaacucaaagaaaauggugugauuaacuacaguguauuagacuugacagcagaagaacuagaggcuaucaaacaucagcuuaauccaaaagauaaugauguagagcuuugaggacuaguacuggcugcaucucccuuuccucuguccuccauccuucucccaggauggugaagggggaccugguacccagugauccccaccccaggauccuaaaucaugacuuaccugcuaauaaaaacucauuggaaaagugagaagaucuaaaaaaaaaaaaaaaaaaaaaaaaaaaaaaaaaaaaaaaaaaaaaaaaaaaaaaaaaaaaaaaaugcaucccccccccccccccccccccccccccccccaaaggcucuuuucagagccaccagaauu

SEQ ID NO: 20511 - RNA, 1554 nt, Artificial Sequence
  mRNA product Design h-1 comprising derived and/or modified sequence from HRSV(Memphis-37)__AIY60635.1__N (opt1)
gggagacccgugacccggaaguuguacggcuacgcgacuuucccucccacaaacccucgcgcccuuccuuuccuacuugggcccggcagaaagcuuaccauggcccugagcaaggugaagcucaacgacacccugaacaaggaccagcugcucuccagcuccaaguacaccauccagcgcagcaccggcgacuccaucgacacccccaacuacgacguccagaagcacaucaacaagcugugcgggaugcugcucaucaccgaggacgccaaccacaaguucaccggcgugaucgggaugcuguacgcgaugagccggcugggccgcgaggacacgaucaagauccuccgggacgccggguaccacgugaaggccaacggcgucgacgugaccacccaccgccaggacaucaacggcaaggagaugaaguucgaggugcugacccuggccucccucacgaccgagauccagaucaacaucgagaucgagagccggaaguccuacaagaagaugcugaaggagaugggggaggucgccccggaguaccgccacgacagccccgacugcggcaugaucauccugugcaucgcggcccucgugaucaccaagcuggccgccggggaccgguccggccugaccgcggugauccgccgggccaacaacguccucaagaacgagaugaagcgcuacaaggggcugcugcccaaggacaucgccaacagcuucuacgagguguucgagaaguacccccacuucaucgacguguucguccacuucggcaucgcccaguccagcacgcggggcgggucccgcguggagggcaucuucgccgggcuguucaugaacgcguacggcgccggccaggugaugcugcgguggggcguccuggccaagagcgugaagaacaucaugcucgggcacgccuccgugcaggccgagauggagcaggucguggagguguacgaguacgcgcagaagcucgggggcgaggccggguucuaccacauccugaacaacccgaaggccagccuccugucccugacccaguucccccacuucagcagcgucgugcucggcaacgccgccggccuggggaucaugggcgaguaccgcgggacgccccggaaccaggaccuguacgacgcggccaaggccuacgccgagcagcucaaggagaacggcgugaucaacuacuccguccuggaccugaccgccgaggagcucgaggcgaucaagcaccagcugaaccccaaggacaacgacguggagcugugaggacuaguacuggcugcaucucccuuuccucuguccuccauccuucucccaggauggugaagggggaccugguacccagugauccccaccccaggauccuaaaucaugacuuaccugcuaauaaaaacucauuggaaaagugagaagaucuaaaaaaaaaaaaaaaaaaaaaaaaaaaaaaaaaaaaaaaaaaaaaaaaaaaaaaaaaaaaaaaaugcaucccccccccccccccccccccccccccccccaaaggcucuuuucagagccaccagaauu

SEQ ID NO: 20512 - RNA, 1554 nt, Artificial Sequence
  mRNA product Design h-1 comprising derived and/or modified sequence from HRSV(Memphis-37)__AIY60635.1__N (opt2)
gggagacccgugacccggaaguuguacggcuacgcgacuuucccucccacaaacccucgcgcccuuccuuuccuacuugggcccggcagaaagcuuaccauggcccucuccaaggucaagcucaacgacacccucaacaaggaccagcuccucuccuccuccaaguacaccauccagcgcuccaccggcgacuccaucgacacccccaacuacgacguccagaagcacaucaacaagcucugcggcaugcuccucaucaccgaggacgccaaccacaaguucaccggcgucaucggcaugcucuacgccaugucccgccucggccgcgaggacaccaucaagauccuccgcgacgccggcuaccacgucaaggccaacggcgucgacgucaccacccaccgccaggacaucaacggcaaggagaugaaguucgagguccucacccucgccucccucaccaccgagauccagaucaacaucgagaucgagucccgcaaguccuacaagaagaugcucaaggagaugggcgaggucgcccccgaguaccgccacgacucccccgacugcggcaugaucauccucugcaucgccgcccucgucaucaccaagcucgccgccggcgaccgcuccggccucaccgccgucauccgccgcgccaacaacguccucaagaacgagaugaagcgcuacaagggccuccuccccaaggacaucgccaacuccuucuacgaggucuucgagaaguacccccacuucaucgacgucuucguccacuucggcaucgcccaguccuccacccgcggcggcucccgcgucgagggcaucuucgccggccucuucaugaacgccuacggcgccggccaggucaugcuccgcuggggcguccucgccaaguccgucaagaacaucaugcucggccacgccuccguccaggccgagauggagcaggucgucgaggucuacgaguacgcccagaagcucggcggcgaggccggcuucuaccacauccucaacaaccccaaggccucccuccucucccucacccaguucccccacuucuccuccgucguccucggcaacgccgccggccucggcaucaugggcgaguaccgcggcaccccccgcaaccaggaccucuacgacgccgccaaggccuacgccgagcagcucaaggagaacggcgucaucaacuacuccguccucgaccucaccgccgaggagcucgaggccaucaagcaccagcucaaccccaaggacaacgacgucgagcucugaggacuaguacuggcugcaucucccuuuccucuguccuccauccuucucccaggauggugaagggggaccugguacccagugauccccaccccaggauccuaaaucaugacuuaccugcuaauaaaaacucauuggaaaagugagaagaucuaaaaaaaaaaaaaaaaaaaaaaaaaaaaaaaaaaaaaaaaaaaaaaaaaaaaaaaaaaaaaaaaugcaucccccccccccccccccccccccccccccccaaaggcucuuuucagagccaccagaauu

SEQ ID NO: 20513 - RNA, 1554 nt, Artificial Sequence
  mRNA product Design h-1 comprising derived and/or modified sequence from HRSV(Memphis-37)__AIY60635.1__N (opt3)
gggagacccgugacccggaaguuguacggcuacgcgacuuucccucccacaaacccucgcgcccuuccuuuccuacuugggcccggcagaaagcuuaccauggcccugagcaaggugaaacucaacgacacccuuaauaaggaucagcuguuguccucuucaaaauacacaauccaaagaaguacuggcgacagcauugauacgcccaacuaugacguccagaagcacauaaauaaauuaugcgggaugcugcuaaucaccgaggaugcuaaccauaaguucacaggaguuauugguaugcucuacgcaauguccaggcugggccgggaagacacuaucaagauucuucgcgaugccggguaucacgugaaagcgaauggaguagacgugaccacacaucgacaggauaucaacggcaaggagaugaaauuugaaguccugaccuuggcuucucucacuacagagauacagaucaauauugaaaucgagucgcguaagucauacaaaaagaugcugaaggagaugggugaaguggccccugaguauagacacgacagcccagauugugggaugauuauccugugcauagcagcccucguuauuaccaaauuagcugcaggagacaggaguggccugacggccgugauccggcgcgcuaacaauguccuuaagaacgaaaugaaaagauacaagggcuugcugccgaaagauauugccaauuccuucuaugagguguuugagaaguacccccauuucaucgacguauuuguucacuucgggaucgcgcaaucuagcacuaggggagguucccggguggaaggcauuuuugcagggcuauucaugaacgccuacggagcuggccaggucaugcuccgcuggggugugcuggccaaaucagugaagaauauaaugcuugggcacgcaaguguccaggcugagauggaacagguuguggagguauaugaauacgcccaaaagcugggaggcgaggcgggcuuuuaucauaucuugaacaauccuaaagccagccuccugucuuuaacccaguucccacacuuuuccucagugguccuggggaacgcagcuggacucgguauuaugggcgaguaccgagggacacccagaaaccaggaccuuuaugaugccgcuaaggccuacgcagaacagcugaaagagaauggagugaucaacuauagcguuuuggaccuaacugccgaggaacuggaagcuauaaagcaucaacucaauccuaaagauaacgacguggagcugugaggacuaguacuggcugcaucucccuuuccucuguccuccauccuucucccaggauggugaagggggaccugguacccagugauccccaccccaggauccuaaaucaugacuuaccugcuaauaaaaacucauuggaaaagugagaagaucuaaaaaaaaaaaaaaaaaaaaaaaaaaaaaaaaaaaaaaaaaaaaaaaaaaaaaaaaaaaaaaaaugcaucccccccccccccccccccccccccccccccaaaggcucuuuucagagccaccagaauu

SEQ ID NO: 20514 - RNA, 1554 nt, Artificial Sequence
  mRNA product Design h-1 comprising derived and/or modified sequence from HRSV(Memphis-37)__AIY60635.1__N (opt4)
gggagacccgugacccggaaguuguacggcuacgcgacuuucccucccacaaacccucgcgcccuuccuuuccuacuugggcccggcagaaagcuuaccauggcccugagcaaggugaagcugaacgacacccugaacaaggaccagcugcugagcagcagcaaguacaccauccagagaagcaccggcgacagcaucgacacccccaacuacgacgugcagaagcacaucaacaagcugugcggcaugcugcugaucaccgaggacgccaaccacaaguucaccggcgugaucggcaugcuguacgccaugagcagacugggcagagaggacaccaucaagauccugagagacgccggcuaccacgugaaggccaacggcguggacgugaccacccacagacaggacaucaacggcaaggagaugaaguucgaggugcugacccuggccagccugaccaccgagauccagaucaacaucgagaucgagagcagaaagagcuacaagaagaugcugaaggagaugggcgagguggcccccgaguacagacacgacagccccgacugcggcaugaucauccugugcaucgccgcccuggugaucaccaagcuggccgccggcgacagaagcggccugaccgccgugaucagaagagccaacaacgugcugaagaacgagaugaagagauacaagggccugcugcccaaggacaucgccaacagcuucuacgagguguucgagaaguacccccacuucaucgacguguucgugcacuucggcaucgcccagagcagcaccagaggcggcagcagaguggagggcaucuucgccggccuguucaugaacgccuacggcgccggccaggugaugcugagauggggcgugcuggccaagagcgugaagaacaucaugcugggccacgccagcgugcaggccgagauggagcaggugguggagguguacgaguacgcccagaagcugggcggcgaggccggcuucuaccacauccugaacaaccccaaggccagccugcugagccugacccaguucccccacuucagcagcguggugcugggcaacgccgccggccugggcaucaugggcgaguacagaggcacccccagaaaccaggaccuguacgacgccgccaaggccuacgccgagcagcugaaggagaacggcgugaucaacuacagcgugcuggaccugaccgccgaggagcuggaggccaucaagcaccagcugaaccccaaggacaacgacguggagcugugaggacuaguacuggcugcaucucccuuuccucuguccuccauccuucucccaggauggugaagggggaccugguacccagugauccccaccccaggauccuaaaucaugacuuaccugcuaauaaaaacucauuggaaaagugagaagaucuaaaaaaaaaaaaaaaaaaaaaaaaaaaaaaaaaaaaaaaaaaaaaaaaaaaaaaaaaaaaaaaaugcaucccccccccccccccccccccccccccccccaaaggcucuuuucagagccaccagaauu

SEQ ID NO: 20515 - RNA, 1554 nt, Artificial Sequence
  mRNA product Design h-1 comprising derived and/or modified sequence from HRSV(Memphis-37)__AIY60635.1__N (opt5)
gggagacccgugacccggaaguuguacggcuacgcgacuuucccucccacaaacccucgcgcccuuccuuuccuacuugggcccggcagaaagcuuaccauggcccugagcaaggugaaacucaacgacacccugaauaaggaucagcuucuguccucuagcaaauacacaauccaaagauccacgggcgacucuauugauacccccaacuaugacguccagaagcacaucaauaaacucugcgggaugcugcuuauuacagaggaugcuaaccauaaguucaccggaguuaucggcaugcuguacgccaugagccggcucgggcgcgaagacacaauuaagauccugagagaugcgggauaucacgugaaagcuaauggcguggacgucaccacacaucggcaggauaucaacgggaaggagaugaaauuugaagugcugacccucgccucccugacgaccgagauucagaucaauauugaaaucgagucucgcaagagcuacaaaaagaugcuuaaggagaugggagaaguugccccugaguauagacacgacuccccggauuguggcaugauuauccugugcauugcugcccucgugaucacaaaacuggcugccggcgaccggagcgggcuuaccgcggucauccgcagagccaacaaugugcugaagaacgaaaugaaacgguacaagggacuccugcccaaagauauugcuaauucuuucuaugagguuuuugagaaguacccucauuucaucgacguguuuguccacuucggcauugcccaauccagcacacgcgggggaucuagaguggaaggcaucuuugcugggcuguucaugaacgccuacggagcgggccaggugaugcuccgguggggcguccuggccaaauccguuaagaauauuaugcuugggcacgcuagcgugcaggccgagauggaacagguggucgagguguaugaauacgcucaaaagcugggaggcgaggccggguuuuaucauauccucaacaaucccaaagccucucugcuuucccugacccaguucccucacuuuagcuccguugugcucggaaacgcugcgggccuggggaucaugggagaguaccgcggcacgcccagaaaccaggaccuguaugaugccgcuaaggccuacgccgaacagcucaaagagaauggcgucauuaacuauucugugcuggaccuuacagcugaggaacuggaagccaucaagcaucaacucaauccuaaagauaacgacguugagcugugaggacuaguacuggcugcaucucccuuuccucuguccuccauccuucucccaggauggugaagggggaccugguacccagugauccccaccccaggauccuaaaucaugacuuaccugcuaauaaaaacucauuggaaaagugagaagaucuaaaaaaaaaaaaaaaaaaaaaaaaaaaaaaaaaaaaaaaaaaaaaaaaaaaaaaaaaaaaaaaaugcaucccccccccccccccccccccccccccccccaaaggcucuuuucagagccaccagaauu

SEQ ID NO: 20516 - RNA, 1554 nt, Artificial Sequence
  mRNA product Design h-1 comprising derived and/or modified sequence from HRSV(Memphis-37)__AIY60635.1__N (opt6)
gggagacccgugacccggaaguuguacggcuacgcgacuuucccucccacaaacccucgcgcccuuccuuuccuacuugggcccggcagaaagcuuaccauggccuuaaguaaaguaaaauuaaacgacacacuaaacaaagaccaauuacucucaucaucgaaauauacaauacaaagauccacaggagacuccauagauacaccaaauuacgacguacaaaaacauauaaacaaacucugcggaauguuauuaauaacagaagacgcaaaccacaaauucacaggagucauagguaugcuauacgcaaugucaagauuaggaagagaagauacaauaaaaauacuaagagacgcaggauaccacguaaaagcaaacggaguagacguaacaacacauagacaagauauaaacgguaaagaaaugaaauucgaaguacuaacacuagccagucuaacaacagaaauacaaauaaacauagaaauagaaagccgaaaaucauacaaaaaaauguuaaaagaaaugggggaaguagcacccgaauacagacaugauucaccugacugcggaaugauaauacucugcauagcggcauuagucauaacaaaacuagccgcaggagacagaagcggauuaacagcaguaauaagaagagcaaauaauguauuaaaaaaugaaaugaaaagguauaaaggauuacuaccaaaagauauagcaaacucauucuaugaaguuuucgaaaaauacccacacuucauagacgucuucguacacuuuggaauagcacaaagcagcacaagaggaggaagcagaguagaaggaauauucgcaggacuauucaugaaugcauacggagccggacaaguaaugcuaagauggggaguuuuagcaaaaagcguaaaaaacauaauguuaggacacgccuccguccaagccgaaauggaacaaguaguagaaguauacgaauaugcacaaaaacuaggaggagaagcaggauucuaucacauacucaauaacccaaaagcaucacuauugagcuuaacacaauucccacauuuuucauccguaguccuaggaaaugcagcaggcuuaggaauaaugggagaauacagaggcacaccaagaaaucaagacuuauacgaugcagcaaaagcauacgcagaacaacuaaaagaaaacggaguaauaaacuacucaguauuagauuuaacagcagaagaauuagaagcaauaaaacaucaacuaaauccuaaggauaaugauguagaacucuaaggacuaguacuggcugcaucucccuuuccucuguccuccauccuucucccaggauggugaagggggaccugguacccagugauccccaccccaggauccuaaaucaugacuuaccugcuaauaaaaacucauuggaaaagugagaagaucuaaaaaaaaaaaaaaaaaaaaaaaaaaaaaaaaaaaaaaaaaaaaaaaaaaaaaaaaaaaaaaaaugcaucccccccccccccccccccccccccccccccaaaggcucuuuucagagccaccagaauu

SEQ ID NO: 20517 - RNA, 1554 nt, Artificial Sequence
  mRNA product Design h-1 comprising derived and/or modified sequence from HRSV(Memphis-37)__AIY60635.1__N (opt11)
gggagacccgugacccggaaguuguacggcuacgcgacuuucccucccacaaacccucgcgcccuuccuuuccuacuugggcccggcagaaagcuuaccauggcccuaagcaaagucaaacucaacgacacacuaaacaaagaccaacuccucagcuccagcaaauacaccauccaacgauccaccggcgacuccauagacacccccaacuacgacguccaaaaacacaucaacaaacuaugcggcaugcuccuaaucacagaagacgccaaccacaaauucaccggagucaucggcaugcucuacgccaugagccgccucggccgagaagacacaaucaaaauacuaagagacgccggcuaccacguaaaagccaacggcguagacguaaccacccaccgccaagacaucaacggcaaagaaaugaaauucgaaguucucacccucgccucacuaaccacggaaauccaaauaaacauugaaaucgaaagcagaaaauccuacaaaaagaugcuaaaagaaaugggcgagguagccccagaauaccgccacgacagccccgacugcggaaugaucauccucugcauugcagcccucgucaucaccaaacuagccgccggcgacagaagcggccuaaccgcaguaauccgccgagccaacaacguacucaaaaacgaaaugaaacgcuacaaaggccuccuccccaaagacaucgccaacagcuucuacgaaguauucgaaaaauacccgcacuucaucgacgucuucguacacuucggcauagcccaaagcagcacacgaggcggcucccgcgucgaaggaauauucgccggccuguucaugaacgcauacggagcgggccaagucaugcuccgcugggguguacuagccaaguccgucaaaaacaucaugcuagggcacgcaagcguacaagccgaaauggaacaaguagucgaagucuacgaauacgcacaaaaacuaggcggcgaagccggcuucuaccacauccuaaacaaccccaaagccucauuacucucccucacccaauuuccucacuucuccagcgucguccucggaaacgccgccggccuaggcauaaugggggaauaccgcggcaccccgcgcaaccaagaccucuacgacgcagcaaaagccuacgcagaacaacuaaaagaaaacggagucaucaacuacagcguacuggaccuaaccgccgaagaacucgaagccauaaaacaccaacucaaccccaaagacaacgacgucgagcucuaaggacuaguacuggcugcaucucccuuuccucuguccuccauccuucucccaggauggugaagggggaccugguacccagugauccccaccccaggauccuaaaucaugacuuaccugcuaauaaaaacucauuggaaaagugagaagaucuaaaaaaaaaaaaaaaaaaaaaaaaaaaaaaaaaaaaaaaaaaaaaaaaaaaaaaaaaaaaaaaaugcaucccccccccccccccccccccccccccccccaaaggcucuuuucagagccaccagaauu

SEQ ID NO: 20518 - RNA, 1770 nt, Artificial Sequence
  mRNA product Design h-2 comprising derived and/or modified sequence from HRSV(Memphis-37)__AIY60635.1__N (wt)
gggagacccgugacccggaaguuguacggcuacgcgacuuucccucccacaaacccucgcgcccuuccuuuccuacuugggcccggcagaaagcuuaccauggcucuuagcaaagucaaguugaacgauacacucaacaaagaucaacuucugucauccagcaaauacaccauccaacggagcacaggagauaguauugauacuccuaauuaugaugugcagaaacacaucaacaaguuauguggcauguuauuaaucacagaagaugcuaaucauaaauucacugggguaauagguauguuauaugcuaugucuagauuaggaagagaagacaccauaaaaauacucagagaugcgggauaucauguaaaagcaaauggaguggauguaacaacacaucgucaagacauuaauggaaaagaaaugaaauuugaaguguuaacauuggcaagcuuaacaacugaaauucaaaucaacauugagauagaaucuaggaaauccuacaaaaaaaugcuaaaagaaaugggagagguggcuccagaauacaggcaugacucuccugauuguggaaugauaauauuauguauagcagcauuaguaauaaccaaauuagcagcaggggauagaucuggucuuacugcugugauuaggagagcuaauaauguucuaaaaaaugaaaugaaacguuauaaaggcuuacuaccaaaggauauagccaacagcuucuaugaaguguuugaaaaauauccucacuuuauagauguuuuuguucauuuugguauagcacaaucuucuaccagagguggcaguagaguugaagggauuuuugcaggauuguuuaugaaugccuauggugcagggcaagugauguuacgguggggagucuuagcaaaaucaguuaaaaauauuaugcuaggacaugcuagugugcaagcagaaauggaacaaguuguggaaguuuaugaauaugcccaaaaauuggguggagaagcaggauucuaccauauauugaacaauccaaaagcaucauuauuaucuuugacucaauuuccccacuucuccaguguaguauugggcaaugcugcuggccuaggcauaaugggagaauacagagguacaccaaggaaucaagaucuauaugaugcugcaaaggcauaugcugaacaacucaaagaaaauggugugauuaacuacaguguauuagacuugacagcagaagaacuagaggcuaucaaacaucagcuuaauccaaaagauaaugauguagagcuuugaggacuagugaagggaacacccaaauuuaauucagccuuaagcacaauuaauuaagagugaaacguaauuguacaagcaguuggucacccaccauagggcaugaucaacaccgcaaccuuuccuuuuucccccagugauucugaaaaaccccucuucccuucagcuugcuuagauguuccaaauuuaguaagcuuaaggcggccuacagaagaaaaagaaaaaaaaggccacaaaaguucccucucacuuucaguaaauaaaauaaaagcagcaacagaaauaaagaaauaaaugaaauucaaaaugaaauaaauauuguguugugcagcauuaaaaaaucaauaaaaauuaaaaaugagcaagaucuaaaaaaaaaaaaaaaaaaaaaaaaaaaaaaaaaaaaaaaaaaaaaaaaaaaaaaaaaaaaaaaaugcaucccccccccccccccccccccccccccccccaaaggcucuuuucagagccaccagaauu

SEQ ID NO: 20519 - RNA, 1770 nt, Artificial Sequence
  mRNA product Design h-2 comprising derived and/or modified sequence from HRSV(Memphis-37)__AIY60635.1__N (opt1)
gggagacccgugacccggaaguuguacggcuacgcgacuuucccucccacaaacccucgcgcccuuccuuuccuacuugggcccggcagaaagcuuaccauggcccugagcaaggugaagcucaacgacacccugaacaaggaccagcugcucuccagcuccaaguacaccauccagcgcagcaccggcgacuccaucgacacccccaacuacgacguccagaagcacaucaacaagcugugcgggaugcugcucaucaccgaggacgccaaccacaaguucaccggcgugaucgggaugcuguacgcgaugagccggcugggccgcgaggacacgaucaagauccuccgggacgccggguaccacgugaaggccaacggcgucgacgugaccacccaccgccaggacaucaacggcaaggagaugaaguucgaggugcugacccuggccucccucacgaccgagauccagaucaacaucgagaucgagagccggaaguccuacaagaagaugcugaaggagaugggggaggucgccccggaguaccgccacgacagccccgacugcggcaugaucauccugugcaucgcggcccucgugaucaccaagcuggccgccggggaccgguccggccugaccgcggugauccgccgggccaacaacguccucaagaacgagaugaagcgcuacaaggggcugcugcccaaggacaucgccaacagcuucuacgagguguucgagaaguacccccacuucaucgacguguucguccacuucggcaucgcccaguccagcacgcggggcgggucccgcguggagggcaucuucgccgggcuguucaugaacgcguacggcgccggccaggugaugcugcgguggggcguccuggccaagagcgugaagaacaucaugcucgggcacgccuccgugcaggccgagauggagcaggucguggagguguacgaguacgcgcagaagcucgggggcgaggccggguucuaccacauccugaacaacccgaaggccagccuccugucccugacccaguucccccacuucagcagcgucgugcucggcaacgccgccggccuggggaucaugggcgaguaccgcgggacgccccggaaccaggaccuguacgacgcggccaaggccuacgccgagcagcucaaggagaacggcgugaucaacuacuccguccuggaccugaccgccgaggagcucgaggcgaucaagcaccagcugaaccccaaggacaacgacguggagcugugaggacuagugaagggaacacccaaauuuaauucagccuuaagcacaauuaauuaagagugaaacguaauuguacaagcaguuggucacccaccauagggcaugaucaacaccgcaaccuuuccuuuuucccccagugauucugaaaaaccccucuucccuucagcuugcuuagauguuccaaauuuaguaagcuuaaggcggccuacagaagaaaaagaaaaaaaaggccacaaaaguucccucucacuuucaguaaauaaaauaaaagcagcaacagaaauaaagaaauaaaugaaauucaaaaugaaauaaauauuguguugugcagcauuaaaaaaucaauaaaaauuaaaaaugagcaagaucuaaaaaaaaaaaaaaaaaaaaaaaaaaaaaaaaaaaaaaaaaaaaaaaaaaaaaaaaaaaaaaaaugcaucccccccccccccccccccccccccccccccaaaggcucuuuucagagccaccagaauu

SEQ ID NO: 20520 - RNA, 1770 nt, Artificial Sequence
  mRNA product Design h-2 comprising derived and/or modified sequence from HRSV(Memphis-37)__AIY60635.1__N (opt2)
gggagacccgugacccggaaguuguacggcuacgcgacuuucccucccacaaacccucgcgcccuuccuuuccuacuugggcccggcagaaagcuuaccauggcccucuccaaggucaagcucaacgacacccucaacaaggaccagcuccucuccuccuccaaguacaccauccagcgcuccaccggcgacuccaucgacacccccaacuacgacguccagaagcacaucaacaagcucugcggcaugcuccucaucaccgaggacgccaaccacaaguucaccggcgucaucggcaugcucuacgccaugucccgccucggccgcgaggacaccaucaagauccuccgcgacgccggcuaccacgucaaggccaacggcgucgacgucaccacccaccgccaggacaucaacggcaaggagaugaaguucgagguccucacccucgccucccucaccaccgagauccagaucaacaucgagaucgagucccgcaaguccuacaagaagaugcucaaggagaugggcgaggucgcccccgaguaccgccacgacucccccgacugcggcaugaucauccucugcaucgccgcccucgucaucaccaagcucgccgccggcgaccgcuccggccucaccgccgucauccgccgcgccaacaacguccucaagaacgagaugaagcgcuacaagggccuccuccccaaggacaucgccaacuccuucuacgaggucuucgagaaguacccccacuucaucgacgucuucguccacuucggcaucgcccaguccuccacccgcggcggcucccgcgucgagggcaucuucgccggccucuucaugaacgccuacggcgccggccaggucaugcuccgcuggggcguccucgccaaguccgucaagaacaucaugcucggccacgccuccguccaggccgagauggagcaggucgucgaggucuacgaguacgcccagaagcucggcggcgaggccggcuucuaccacauccucaacaaccccaaggccucccuccucucccucacccaguucccccacuucuccuccgucguccucggcaacgccgccggccucggcaucaugggcgaguaccgcggcaccccccgcaaccaggaccucuacgacgccgccaaggccuacgccgagcagcucaaggagaacggcgucaucaacuacuccguccucgaccucaccgccgaggagcucgaggccaucaagcaccagcucaaccccaaggacaacgacgucgagcucugaggacuagugaagggaacacccaaauuuaauucagccuuaagcacaauuaauuaagagugaaacguaauuguacaagcaguuggucacccaccauagggcaugaucaacaccgcaaccuuuccuuuuucccccagugauucugaaaaaccccucuucccuucagcuugcuuagauguuccaaauuuaguaagcuuaaggcggccuacagaagaaaaagaaaaaaaaggccacaaaaguucccucucacuuucaguaaauaaaauaaaagcagcaacagaaauaaagaaauaaaugaaauucaaaaugaaauaaauauuguguugugcagcauuaaaaaaucaauaaaaauuaaaaaugagcaagaucuaaaaaaaaaaaaaaaaaaaaaaaaaaaaaaaaaaaaaaaaaaaaaaaaaaaaaaaaaaaaaaaaugcaucccccccccccccccccccccccccccccccaaaggcucuuuucagagccaccagaauu

SEQ ID NO: 20521 - RNA, 1770 nt, Artificial Sequence
  mRNA product Design h-2 comprising derived and/or modified sequence from HRSV(Memphis-37)__AIY60635.1__N (opt3)
gggagacccgugacccggaaguuguacggcuacgcgacuuucccucccacaaacccucgcgcccuuccuuuccuacuugggcccggcagaaagcuuaccauggcccugagcaaggugaaacucaacgacacccuuaauaaggaucagcuguuguccucuucaaaauacacaauccaaagaaguacuggcgacagcauugauacgcccaacuaugacguccagaagcacauaaauaaauuaugcgggaugcugcuaaucaccgaggaugcuaaccauaaguucacaggaguuauugguaugcucuacgcaauguccaggcugggccgggaagacacuaucaagauucuucgcgaugccggguaucacgugaaagcgaauggaguagacgugaccacacaucgacaggauaucaacggcaaggagaugaaauuugaaguccugaccuuggcuucucucacuacagagauacagaucaauauugaaaucgagucgcguaagucauacaaaaagaugcugaaggagaugggugaaguggccccugaguauagacacgacagcccagauugugggaugauuauccugugcauagcagcccucguuauuaccaaauuagcugcaggagacaggaguggccugacggccgugauccggcgcgcuaacaauguccuuaagaacgaaaugaaaagauacaagggcuugcugccgaaagauauugccaauuccuucuaugagguguuugagaaguacccccauuucaucgacguauuuguucacuucgggaucgcgcaaucuagcacuaggggagguucccggguggaaggcauuuuugcagggcuauucaugaacgccuacggagcuggccaggucaugcuccgcuggggugugcuggccaaaucagugaagaauauaaugcuugggcacgcaaguguccaggcugagauggaacagguuguggagguauaugaauacgcccaaaagcugggaggcgaggcgggcuuuuaucauaucuugaacaauccuaaagccagccuccugucuuuaacccaguucccacacuuuuccucagugguccuggggaacgcagcuggacucgguauuaugggcgaguaccgagggacacccagaaaccaggaccuuuaugaugccgcuaaggccuacgcagaacagcugaaagagaauggagugaucaacuauagcguuuuggaccuaacugccgaggaacuggaagcuauaaagcaucaacucaauccuaaagauaacgacguggagcugugaggacuagugaagggaacacccaaauuuaauucagccuuaagcacaauuaauuaagagugaaacguaauuguacaagcaguuggucacccaccauagggcaugaucaacaccgcaaccuuuccuuuuucccccagugauucugaaaaaccccucuucccuucagcuugcuuagauguuccaaauuuaguaagcuuaaggcggccuacagaagaaaaagaaaaaaaaggccacaaaaguucccucucacuuucaguaaauaaaauaaaagcagcaacagaaauaaagaaauaaaugaaauucaaaaugaaauaaauauuguguugugcagcauuaaaaaaucaauaaaaauuaaaaaugagcaagaucuaaaaaaaaaaaaaaaaaaaaaaaaaaaaaaaaaaaaaaaaaaaaaaaaaaaaaaaaaaaaaaaaugcaucccccccccccccccccccccccccccccccaaaggcucuuuucagagccaccagaauu

SEQ ID NO: 20522 - RNA, 1770 nt, Artificial Sequence
  mRNA product Design h-2 comprising derived and/or modified sequence from HRSV(Memphis-37)__AIY60635.1__N (opt4)
gggagacccgugacccggaaguuguacggcuacgcgacuuucccucccacaaacccucgcgcccuuccuuuccuacuugggcccggcagaaagcuuaccauggcccugagcaaggugaagcugaacgacacccugaacaaggaccagcugcugagcagcagcaaguacaccauccagagaagcaccggcgacagcaucgacacccccaacuacgacgugcagaagcacaucaacaagcugugcggcaugcugcugaucaccgaggacgccaaccacaaguucaccggcgugaucggcaugcuguacgccaugagcagacugggcagagaggacaccaucaagauccugagagacgccggcuaccacgugaaggccaacggcguggacgugaccacccacagacaggacaucaacggcaaggagaugaaguucgaggugcugacccuggccagccugaccaccgagauccagaucaacaucgagaucgagagcagaaagagcuacaagaagaugcugaaggagaugggcgagguggcccccgaguacagacacgacagccccgacugcggcaugaucauccugugcaucgccgcccuggugaucaccaagcuggccgccggcgacagaagcggccugaccgccgugaucagaagagccaacaacgugcugaagaacgagaugaagagauacaagggccugcugcccaaggacaucgccaacagcuucuacgagguguucgagaaguacccccacuucaucgacguguucgugcacuucggcaucgcccagagcagcaccagaggcggcagcagaguggagggcaucuucgccggccuguucaugaacgccuacggcgccggccaggugaugcugagauggggcgugcuggccaagagcgugaagaacaucaugcugggccacgccagcgugcaggccgagauggagcaggugguggagguguacgaguacgcccagaagcugggcggcgaggccggcuucuaccacauccugaacaaccccaaggccagccugcugagccugacccaguucccccacuucagcagcguggugcugggcaacgccgccggccugggcaucaugggcgaguacagaggcacccccagaaaccaggaccuguacgacgccgccaaggccuacgccgagcagcugaaggagaacggcgugaucaacuacagcgugcuggaccugaccgccgaggagcuggaggccaucaagcaccagcugaaccccaaggacaacgacguggagcugugaggacuagugaagggaacacccaaauuuaauucagccuuaagcacaauuaauuaagagugaaacguaauuguacaagcaguuggucacccaccauagggcaugaucaacaccgcaaccuuuccuuuuucccccagugauucugaaaaaccccucuucccuucagcuugcuuagauguuccaaauuuaguaagcuuaaggcggccuacagaagaaaaagaaaaaaaaggccacaaaaguucccucucacuuucaguaaauaaaauaaaagcagcaacagaaauaaagaaauaaaugaaauucaaaaugaaauaaauauuguguugugcagcauuaaaaaaucaauaaaaauuaaaaaugagcaagaucuaaaaaaaaaaaaaaaaaaaaaaaaaaaaaaaaaaaaaaaaaaaaaaaaaaaaaaaaaaaaaaaaugcaucccccccccccccccccccccccccccccccaaaggcucuuuucagagccaccagaauu

SEQ ID NO: 20523 - RNA, 1770 nt, Artificial Sequence
  mRNA product Design h-2 comprising derived and/or modified sequence from HRSV(Memphis-37)__AIY60635.1__N (opt5)
gggagacccgugacccggaaguuguacggcuacgcgacuuucccucccacaaacccucgcgcccuuccuuuccuacuugggcccggcagaaagcuuaccauggcccugagcaaggugaaacucaacgacacccugaauaaggaucagcuucuguccucuagcaaauacacaauccaaagauccacgggcgacucuauugauacccccaacuaugacguccagaagcacaucaauaaacucugcgggaugcugcuuauuacagaggaugcuaaccauaaguucaccggaguuaucggcaugcuguacgccaugagccggcucgggcgcgaagacacaauuaagauccugagagaugcgggauaucacgugaaagcuaauggcguggacgucaccacacaucggcaggauaucaacgggaaggagaugaaauuugaagugcugacccucgccucccugacgaccgagauucagaucaauauugaaaucgagucucgcaagagcuacaaaaagaugcuuaaggagaugggagaaguugccccugaguauagacacgacuccccggauuguggcaugauuauccugugcauugcugcccucgugaucacaaaacuggcugccggcgaccggagcgggcuuaccgcggucauccgcagagccaacaaugugcugaagaacgaaaugaaacgguacaagggacuccugcccaaagauauugcuaauucuuucuaugagguuuuugagaaguacccucauuucaucgacguguuuguccacuucggcauugcccaauccagcacacgcgggggaucuagaguggaaggcaucuuugcugggcuguucaugaacgccuacggagcgggccaggugaugcuccgguggggcguccuggccaaauccguuaagaauauuaugcuugggcacgcuagcgugcaggccgagauggaacagguggucgagguguaugaauacgcucaaaagcugggaggcgaggccggguuuuaucauauccucaacaaucccaaagccucucugcuuucccugacccaguucccucacuuuagcuccguugugcucggaaacgcugcgggccuggggaucaugggagaguaccgcggcacgcccagaaaccaggaccuguaugaugccgcuaaggccuacgccgaacagcucaaagagaauggcgucauuaacuauucugugcuggaccuuacagcugaggaacuggaagccaucaagcaucaacucaauccuaaagauaacgacguugagcugugaggacuagugaagggaacacccaaauuuaauucagccuuaagcacaauuaauuaagagugaaacguaauuguacaagcaguuggucacccaccauagggcaugaucaacaccgcaaccuuuccuuuuucccccagugauucugaaaaaccccucuucccuucagcuugcuuagauguuccaaauuuaguaagcuuaaggcggccuacagaagaaaaagaaaaaaaaggccacaaaaguucccucucacuuucaguaaauaaaauaaaagcagcaacagaaauaaagaaauaaaugaaauucaaaaugaaauaaauauuguguugugcagcauuaaaaaaucaauaaaaauuaaaaaugagcaagaucuaaaaaaaaaaaaaaaaaaaaaaaaaaaaaaaaaaaaaaaaaaaaaaaaaaaaaaaaaaaaaaaaugcaucccccccccccccccccccccccccccccccaaaggcucuuuucagagccaccagaauu

SEQ ID NO: 20524 - RNA, 1770 nt, Artificial Sequence
  mRNA product Design h-2 comprising derived and/or modified sequence from HRSV(Memphis-37)__AIY60635.1__N (opt6)
gggagacccgugacccggaaguuguacggcuacgcgacuuucccucccacaaacccucgcgcccuuccuuuccuacuugggcccggcagaaagcuuaccauggccuuaaguaaaguaaaauuaaacgacacacuaaacaaagaccaauuacucucaucaucgaaauauacaauacaaagauccacaggagacuccauagauacaccaaauuacgacguacaaaaacauauaaacaaacucugcggaauguuauuaauaacagaagacgcaaaccacaaauucacaggagucauagguaugcuauacgcaaugucaagauuaggaagagaagauacaauaaaaauacuaagagacgcaggauaccacguaaaagcaaacggaguagacguaacaacacauagacaagauauaaacgguaaagaaaugaaauucgaaguacuaacacuagccagucuaacaacagaaauacaaauaaacauagaaauagaaagccgaaaaucauacaaaaaaauguuaaaagaaaugggggaaguagcacccgaauacagacaugauucaccugacugcggaaugauaauacucugcauagcggcauuagucauaacaaaacuagccgcaggagacagaagcggauuaacagcaguaauaagaagagcaaauaauguauuaaaaaaugaaaugaaaagguauaaaggauuacuaccaaaagauauagcaaacucauucuaugaaguuuucgaaaaauacccacacuucauagacgucuucguacacuuuggaauagcacaaagcagcacaagaggaggaagcagaguagaaggaauauucgcaggacuauucaugaaugcauacggagccggacaaguaaugcuaagauggggaguuuuagcaaaaagcguaaaaaacauaauguuaggacacgccuccguccaagccgaaauggaacaaguaguagaaguauacgaauaugcacaaaaacuaggaggagaagcaggauucuaucacauacucaauaacccaaaagcaucacuauugagcuuaacacaauucccacauuuuucauccguaguccuaggaaaugcagcaggcuuaggaauaaugggagaauacagaggcacaccaagaaaucaagacuuauacgaugcagcaaaagcauacgcagaacaacuaaaagaaaacggaguaauaaacuacucaguauuagauuuaacagcagaagaauuagaagcaauaaaacaucaacuaaauccuaaggauaaugauguagaacucuaaggacuagugaagggaacacccaaauuuaauucagccuuaagcacaauuaauuaagagugaaacguaauuguacaagcaguuggucacccaccauagggcaugaucaacaccgcaaccuuuccuuuuucccccagugauucugaaaaaccccucuucccuucagcuugcuuagauguuccaaauuuaguaagcuuaaggcggccuacagaagaaaaagaaaaaaaaggccacaaaaguucccucucacuuucaguaaauaaaauaaaagcagcaacagaaauaaagaaauaaaugaaauucaaaaugaaauaaauauuguguugugcagcauuaaaaaaucaauaaaaauuaaaaaugagcaagaucuaaaaaaaaaaaaaaaaaaaaaaaaaaaaaaaaaaaaaaaaaaaaaaaaaaaaaaaaaaaaaaaaugcaucccccccccccccccccccccccccccccccaaaggcucuuuucagagccaccagaauu

SEQ ID NO: 20525 - RNA, 1770 nt, Artificial Sequence
  mRNA product Design h-2 comprising derived and/or modified sequence from HRSV(Memphis-37)__AIY60635.1__N (opt11)
gggagacccgugacccggaaguuguacggcuacgcgacuuucccucccacaaacccucgcgcccuuccuuuccuacuugggcccggcagaaagcuuaccauggcccuaagcaaagucaaacucaacgacacacuaaacaaagaccaacuccucagcuccagcaaauacaccauccaacgauccaccggcgacuccauagacacccccaacuacgacguccaaaaacacaucaacaaacuaugcggcaugcuccuaaucacagaagacgccaaccacaaauucaccggagucaucggcaugcucuacgccaugagccgccucggccgagaagacacaaucaaaauacuaagagacgccggcuaccacguaaaagccaacggcguagacguaaccacccaccgccaagacaucaacggcaaagaaaugaaauucgaaguucucacccucgccucacuaaccacggaaauccaaauaaacauugaaaucgaaagcagaaaauccuacaaaaagaugcuaaaagaaaugggcgagguagccccagaauaccgccacgacagccccgacugcggaaugaucauccucugcauugcagcccucgucaucaccaaacuagccgccggcgacagaagcggccuaaccgcaguaauccgccgagccaacaacguacucaaaaacgaaaugaaacgcuacaaaggccuccuccccaaagacaucgccaacagcuucuacgaaguauucgaaaaauacccgcacuucaucgacgucuucguacacuucggcauagcccaaagcagcacacgaggcggcucccgcgucgaaggaauauucgccggccuguucaugaacgcauacggagcgggccaagucaugcuccgcugggguguacuagccaaguccgucaaaaacaucaugcuagggcacgcaagcguacaagccgaaauggaacaaguagucgaagucuacgaauacgcacaaaaacuaggcggcgaagccggcuucuaccacauccuaaacaaccccaaagccucauuacucucccucacccaauuuccucacuucuccagcgucguccucggaaacgccgccggccuaggcauaaugggggaauaccgcggcaccccgcgcaaccaagaccucuacgacgcagcaaaagccuacgcagaacaacuaaaagaaaacggagucaucaacuacagcguacuggaccuaaccgccgaagaacucgaagccauaaaacaccaacucaaccccaaagacaacgacgucgagcucuaaggacuagugaagggaacacccaaauuuaauucagccuuaagcacaauuaauuaagagugaaacguaauuguacaagcaguuggucacccaccauagggcaugaucaacaccgcaaccuuuccuuuuucccccagugauucugaaaaaccccucuucccuucagcuugcuuagauguuccaaauuuaguaagcuuaaggcggccuacagaagaaaaagaaaaaaaaggccacaaaaguucccucucacuuucaguaaauaaaauaaaagcagcaacagaaauaaagaaauaaaugaaauucaaaaugaaauaaauauuguguugugcagcauuaaaaaaucaauaaaaauuaaaaaugagcaagaucuaaaaaaaaaaaaaaaaaaaaaaaaaaaaaaaaaaaaaaaaaaaaaaaaaaaaaaaaaaaaaaaaugcaucccccccccccccccccccccccccccccccaaaggcucuuuucagagccaccagaauu

SEQ ID NO: 20526 - RNA, 1550 nt, Artificial Sequence
  mRNA product Design h-3 comprising derived and/or modified sequence from HRSV(Memphis-37)__AIY60635.1__N (wt)
gggagacccgugacccggaaguuguacggcuacgcgacuuucccucccacaaacccucgcgcccuuccuuuccuacuugggcccggcagaaagcuuaccauggcucuuagcaaagucaaguugaacgauacacucaacaaagaucaacuucugucauccagcaaauacaccauccaacggagcacaggagauaguauugauacuccuaauuaugaugugcagaaacacaucaacaaguuauguggcauguuauuaaucacagaagaugcuaaucauaaauucacugggguaauagguauguuauaugcuaugucuagauuaggaagagaagacaccauaaaaauacucagagaugcgggauaucauguaaaagcaaauggaguggauguaacaacacaucgucaagacauuaauggaaaagaaaugaaauuugaaguguuaacauuggcaagcuuaacaacugaaauucaaaucaacauugagauagaaucuaggaaauccuacaaaaaaaugcuaaaagaaaugggagagguggcuccagaauacaggcaugacucuccugauuguggaaugauaauauuauguauagcagcauuaguaauaaccaaauuagcagcaggggauagaucuggucuuacugcugugauuaggagagcuaauaauguucuaaaaaaugaaaugaaacguuauaaaggcuuacuaccaaaggauauagccaacagcuucuaugaaguguuugaaaaauauccucacuuuauagauguuuuuguucauuuugguauagcacaaucuucuaccagagguggcaguagaguugaagggauuuuugcaggauuguuuaugaaugccuauggugcagggcaagugauguuacgguggggagucuuagcaaaaucaguuaaaaauauuaugcuaggacaugcuagugugcaagcagaaauggaacaaguuguggaaguuuaugaauaugcccaaaaauuggguggagaagcaggauucuaccauauauugaacaauccaaaagcaucauuauuaucuuugacucaauuuccccacuucuccaguguaguauugggcaaugcugcuggccuaggcauaaugggagaauacagagguacaccaaggaaucaagaucuauaugaugcugcaaaggcauaugcugaacaacucaaagaaaauggugugauuaacuacaguguauuagacuugacagcagaagaacuagaggcuaucaaacaucagcuuaauccaaaagauaaugauguagagcuuugaggacuaguggaagcauuuuccuggcugauuaaaagaaauuacucagcuauggucaucuguuccuguuagaaggcuaugcagcauauuauauacuaugcgcauguuaugaaaugcauaauaaaaaauuuuaaaaaaucuaaaagaucuaaaaaaaaaaaaaaaaaaaaaaaaaaaaaaaaaaaaaaaaaaaaaaaaaaaaaaaaaaaaaaaaugcaucccccccccccccccccccccccccccccccaaaggcucuuuucagagccaccagaauu

SEQ ID NO: 20527 - RNA, 1550 nt, Artificial Sequence
  mRNA product Design h-3 comprising derived and/or modified sequence from HRSV(Memphis-37)__AIY60635.1__N (opt1)
gggagacccgugacccggaaguuguacggcuacgcgacuuucccucccacaaacccucgcgcccuuccuuuccuacuugggcccggcagaaagcuuaccauggcccugagcaaggugaagcucaacgacacccugaacaaggaccagcugcucuccagcuccaaguacaccauccagcgcagcaccggcgacuccaucgacacccccaacuacgacguccagaagcacaucaacaagcugugcgggaugcugcucaucaccgaggacgccaaccacaaguucaccggcgugaucgggaugcuguacgcgaugagccggcugggccgcgaggacacgaucaagauccuccgggacgccggguaccacgugaaggccaacggcgucgacgugaccacccaccgccaggacaucaacggcaaggagaugaaguucgaggugcugacccuggccucccucacgaccgagauccagaucaacaucgagaucgagagccggaaguccuacaagaagaugcugaaggagaugggggaggucgccccggaguaccgccacgacagccccgacugcggcaugaucauccugugcaucgcggcccucgugaucaccaagcuggccgccggggaccgguccggccugaccgcggugauccgccgggccaacaacguccucaagaacgagaugaagcgcuacaaggggcugcugcccaaggacaucgccaacagcuucuacgagguguucgagaaguacccccacuucaucgacguguucguccacuucggcaucgcccaguccagcacgcggggcgggucccgcguggagggcaucuucgccgggcuguucaugaacgcguacggcgccggccaggugaugcugcgguggggcguccuggccaagagcgugaagaacaucaugcucgggcacgccuccgugcaggccgagauggagcaggucguggagguguacgaguacgcgcagaagcucgggggcgaggccggguucuaccacauccugaacaacccgaaggccagccuccugucccugacccaguucccccacuucagcagcgucgugcucggcaacgccgccggccuggggaucaugggcgaguaccgcgggacgccccggaaccaggaccuguacgacgcggccaaggccuacgccgagcagcucaaggagaacggcgugaucaacuacuccguccuggaccugaccgccgaggagcucgaggcgaucaagcaccagcugaaccccaaggacaacgacguggagcugugaggacuaguggaagcauuuuccuggcugauuaaaagaaauuacucagcuauggucaucuguuccuguuagaaggcuaugcagcauauuauauacuaugcgcauguuaugaaaugcauaauaaaaaauuuuaaaaaaucuaaaagaucuaaaaaaaaaaaaaaaaaaaaaaaaaaaaaaaaaaaaaaaaaaaaaaaaaaaaaaaaaaaaaaaaugcaucccccccccccccccccccccccccccccccaaaggcucuuuucagagccaccagaauu

SEQ ID NO: 20528 - RNA, 1550 nt, Artificial Sequence
  mRNA product Design h-3 comprising derived and/or modified sequence from HRSV(Memphis-37)__AIY60635.1__N (opt2)
gggagacccgugacccggaaguuguacggcuacgcgacuuucccucccacaaacccucgcgcccuuccuuuccuacuugggcccggcagaaagcuuaccauggcccucuccaaggucaagcucaacgacacccucaacaaggaccagcuccucuccuccuccaaguacaccauccagcgcuccaccggcgacuccaucgacacccccaacuacgacguccagaagcacaucaacaagcucugcggcaugcuccucaucaccgaggacgccaaccacaaguucaccggcgucaucggcaugcucuacgccaugucccgccucggccgcgaggacaccaucaagauccuccgcgacgccggcuaccacgucaaggccaacggcgucgacgucaccacccaccgccaggacaucaacggcaaggagaugaaguucgagguccucacccucgccucccucaccaccgagauccagaucaacaucgagaucgagucccgcaaguccuacaagaagaugcucaaggagaugggcgaggucgcccccgaguaccgccacgacucccccgacugcggcaugaucauccucugcaucgccgcccucgucaucaccaagcucgccgccggcgaccgcuccggccucaccgccgucauccgccgcgccaacaacguccucaagaacgagaugaagcgcuacaagggccuccuccccaaggacaucgccaacuccuucuacgaggucuucgagaaguacccccacuucaucgacgucuucguccacuucggcaucgcccaguccuccacccgcggcggcucccgcgucgagggcaucuucgccggccucuucaugaacgccuacggcgccggccaggucaugcuccgcuggggcguccucgccaaguccgucaagaacaucaugcucggccacgccuccguccaggccgagauggagcaggucgucgaggucuacgaguacgcccagaagcucggcggcgaggccggcuucuaccacauccucaacaaccccaaggccucccuccucucccucacccaguucccccacuucuccuccgucguccucggcaacgccgccggccucggcaucaugggcgaguaccgcggcaccccccgcaaccaggaccucuacgacgccgccaaggccuacgccgagcagcucaaggagaacggcgucaucaacuacuccguccucgaccucaccgccgaggagcucgaggccaucaagcaccagcucaaccccaaggacaacgacgucgagcucugaggacuaguggaagcauuuuccuggcugauuaaaagaaauuacucagcuauggucaucuguuccuguuagaaggcuaugcagcauauuauauacuaugcgcauguuaugaaaugcauaauaaaaaauuuuaaaaaaucuaaaagaucuaaaaaaaaaaaaaaaaaaaaaaaaaaaaaaaaaaaaaaaaaaaaaaaaaaaaaaaaaaaaaaaaugcaucccccccccccccccccccccccccccccccaaaggcucuuuucagagccaccagaauu

SEQ ID NO: 20529 - RNA, 1550 nt, Artificial Sequence
  mRNA product Design h-3 comprising derived and/or modified sequence from HRSV(Memphis-37)__AIY60635.1__N (opt3)
gggagacccgugacccggaaguuguacggcuacgcgacuuucccucccacaaacccucgcgcccuuccuuuccuacuugggcccggcagaaagcuuaccauggcccugagcaaggugaaacucaacgacacccuuaauaaggaucagcuguuguccucuucaaaauacacaauccaaagaaguacuggcgacagcauugauacgcccaacuaugacguccagaagcacauaaauaaauuaugcgggaugcugcuaaucaccgaggaugcuaaccauaaguucacaggaguuauugguaugcucuacgcaauguccaggcugggccgggaagacacuaucaagauucuucgcgaugccggguaucacgugaaagcgaauggaguagacgugaccacacaucgacaggauaucaacggcaaggagaugaaauuugaaguccugaccuuggcuucucucacuacagagauacagaucaauauugaaaucgagucgcguaagucauacaaaaagaugcugaaggagaugggugaaguggccccugaguauagacacgacagcccagauugugggaugauuauccugugcauagcagcccucguuauuaccaaauuagcugcaggagacaggaguggccugacggccgugauccggcgcgcuaacaauguccuuaagaacgaaaugaaaagauacaagggcuugcugccgaaagauauugccaauuccuucuaugagguguuugagaaguacccccauuucaucgacguauuuguucacuucgggaucgcgcaaucuagcacuaggggagguucccggguggaaggcauuuuugcagggcuauucaugaacgccuacggagcuggccaggucaugcuccgcuggggugugcuggccaaaucagugaagaauauaaugcuugggcacgcaaguguccaggcugagauggaacagguuguggagguauaugaauacgcccaaaagcugggaggcgaggcgggcuuuuaucauaucuugaacaauccuaaagccagccuccugucuuuaacccaguucccacacuuuuccucagugguccuggggaacgcagcuggacucgguauuaugggcgaguaccgagggacacccagaaaccaggaccuuuaugaugccgcuaaggccuacgcagaacagcugaaagagaauggagugaucaacuauagcguuuuggaccuaacugccgaggaacuggaagcuauaaagcaucaacucaauccuaaagauaacgacguggagcugugaggacuaguggaagcauuuuccuggcugauuaaaagaaauuacucagcuauggucaucuguuccuguuagaaggcuaugcagcauauuauauacuaugcgcauguuaugaaaugcauaauaaaaaauuuuaaaaaaucuaaaagaucuaaaaaaaaaaaaaaaaaaaaaaaaaaaaaaaaaaaaaaaaaaaaaaaaaaaaaaaaaaaaaaaaugcaucccccccccccccccccccccccccccccccaaaggcucuuuucagagccaccagaauu

SEQ ID NO: 20530 - RNA, 1550 nt, Artificial Sequence
  mRNA product Design h-3 comprising derived and/or modified sequence from HRSV(Memphis-37)__AIY60635.1__N (opt4)
gggagacccgugacccggaaguuguacggcuacgcgacuuucccucccacaaacccucgcgcccuuccuuuccuacuugggcccggcagaaagcuuaccauggcccugagcaaggugaagcugaacgacacccugaacaaggaccagcugcugagcagcagcaaguacaccauccagagaagcaccggcgacagcaucgacacccccaacuacgacgugcagaagcacaucaacaagcugugcggcaugcugcugaucaccgaggacgccaaccacaaguucaccggcgugaucggcaugcuguacgccaugagcagacugggcagagaggacaccaucaagauccugagagacgccggcuaccacgugaaggccaacggcguggacgugaccacccacagacaggacaucaacggcaaggagaugaaguucgaggugcugacccuggccagccugaccaccgagauccagaucaacaucgagaucgagagcagaaagagcuacaagaagaugcugaaggagaugggcgagguggcccccgaguacagacacgacagccccgacugcggcaugaucauccugugcaucgccgcccuggugaucaccaagcuggccgccggcgacagaagcggccugaccgccgugaucagaagagccaacaacgugcugaagaacgagaugaagagauacaagggccugcugcccaaggacaucgccaacagcuucuacgagguguucgagaaguacccccacuucaucgacguguucgugcacuucggcaucgcccagagcagcaccagaggcggcagcagaguggagggcaucuucgccggccuguucaugaacgccuacggcgccggccaggugaugcugagauggggcgugcuggccaagagcgugaagaacaucaugcugggccacgccagcgugcaggccgagauggagcaggugguggagguguacgaguacgcccagaagcugggcggcgaggccggcuucuaccacauccugaacaaccccaaggccagccugcugagccugacccaguucccccacuucagcagcguggugcugggcaacgccgccggccugggcaucaugggcgaguacagaggcacccccagaaaccaggaccuguacgacgccgccaaggccuacgccgagcagcugaaggagaacggcgugaucaacuacagcgugcuggaccugaccgccgaggagcuggaggccaucaagcaccagcugaaccccaaggacaacgacguggagcugugaggacuaguggaagcauuuuccuggcugauuaaaagaaauuacucagcuauggucaucuguuccuguuagaaggcuaugcagcauauuauauacuaugcgcauguuaugaaaugcauaauaaaaaauuuuaaaaaaucuaaaagaucuaaaaaaaaaaaaaaaaaaaaaaaaaaaaaaaaaaaaaaaaaaaaaaaaaaaaaaaaaaaaaaaaugcaucccccccccccccccccccccccccccccccaaaggcucuuuucagagccaccagaauu

SEQ ID NO: 20531 - RNA, 1550 nt, Artificial Sequence
  mRNA product Design h-3 comprising derived and/or modified sequence from HRSV(Memphis-37)__AIY60635.1__N (opt5)
gggagacccgugacccggaaguuguacggcuacgcgacuuucccucccacaaacccucgcgcccuuccuuuccuacuugggcccggcagaaagcuuaccauggcccugagcaaggugaaacucaacgacacccugaauaaggaucagcuucuguccucuagcaaauacacaauccaaagauccacgggcgacucuauugauacccccaacuaugacguccagaagcacaucaauaaacucugcgggaugcugcuuauuacagaggaugcuaaccauaaguucaccggaguuaucggcaugcuguacgccaugagccggcucgggcgcgaagacacaauuaagauccugagagaugcgggauaucacgugaaagcuaauggcguggacgucaccacacaucggcaggauaucaacgggaaggagaugaaauuugaagugcugacccucgccucccugacgaccgagauucagaucaauauugaaaucgagucucgcaagagcuacaaaaagaugcuuaaggagaugggagaaguugccccugaguauagacacgacuccccggauuguggcaugauuauccugugcauugcugcccucgugaucacaaaacuggcugccggcgaccggagcgggcuuaccgcggucauccgcagagccaacaaugugcugaagaacgaaaugaaacgguacaagggacuccugcccaaagauauugcuaauucuuucuaugagguuuuugagaaguacccucauuucaucgacguguuuguccacuucggcauugcccaauccagcacacgcgggggaucuagaguggaaggcaucuuugcugggcuguucaugaacgccuacggagcgggccaggugaugcuccgguggggcguccuggccaaauccguuaagaauauuaugcuugggcacgcuagcgugcaggccgagauggaacagguggucgagguguaugaauacgcucaaaagcugggaggcgaggccggguuuuaucauauccucaacaaucccaaagccucucugcuuucccugacccaguucccucacuuuagcuccguugugcucggaaacgcugcgggccuggggaucaugggagaguaccgcggcacgcccagaaaccaggaccuguaugaugccgcuaaggccuacgccgaacagcucaaagagaauggcgucauuaacuauucugugcuggaccuuacagcugaggaacuggaagccaucaagcaucaacucaauccuaaagauaacgacguugagcugugaggacuaguggaagcauuuuccuggcugauuaaaagaaauuacucagcuauggucaucuguuccuguuagaaggcuaugcagcauauuauauacuaugcgcauguuaugaaaugcauaauaaaaaauuuuaaaaaaucuaaaagaucuaaaaaaaaaaaaaaaaaaaaaaaaaaaaaaaaaaaaaaaaaaaaaaaaaaaaaaaaaaaaaaaaugcaucccccccccccccccccccccccccccccccaaaggcucuuuucagagccaccagaauu

SEQ ID NO: 20532 - RNA, 1550 nt, Artificial Sequence
  mRNA product Design h-3 comprising derived and/or modified sequence from HRSV(Memphis-37)__AIY60635.1__N (opt6)
gggagacccgugacccggaaguuguacggcuacgcgacuuucccucccacaaacccucgcgcccuuccuuuccuacuugggcccggcagaaagcuuaccauggccuuaaguaaaguaaaauuaaacgacacacuaaacaaagaccaauuacucucaucaucgaaauauacaauacaaagauccacaggagacuccauagauacaccaaauuacgacguacaaaaacauauaaacaaacucugcggaauguuauuaauaacagaagacgcaaaccacaaauucacaggagucauagguaugcuauacgcaaugucaagauuaggaagagaagauacaauaaaaauacuaagagacgcaggauaccacguaaaagcaaacggaguagacguaacaacacauagacaagauauaaacgguaaagaaaugaaauucgaaguacuaacacuagccagucuaacaacagaaauacaaauaaacauagaaauagaaagccgaaaaucauacaaaaaaauguuaaaagaaaugggggaaguagcacccgaauacagacaugauucaccugacugcggaaugauaauacucugcauagcggcauuagucauaacaaaacuagccgcaggagacagaagcggauuaacagcaguaauaagaagagcaaauaauguauuaaaaaaugaaaugaaaagguauaaaggauuacuaccaaaagauauagcaaacucauucuaugaaguuuucgaaaaauacccacacuucauagacgucuucguacacuuuggaauagcacaaagcagcacaagaggaggaagcagaguagaaggaauauucgcaggacuauucaugaaugcauacggagccggacaaguaaugcuaagauggggaguuuuagcaaaaagcguaaaaaacauaauguuaggacacgccuccguccaagccgaaauggaacaaguaguagaaguauacgaauaugcacaaaaacuaggaggagaagcaggauucuaucacauacucaauaacccaaaagcaucacuauugagcuuaacacaauucccacauuuuucauccguaguccuaggaaaugcagcaggcuuaggaauaaugggagaauacagaggcacaccaagaaaucaagacuuauacgaugcagcaaaagcauacgcagaacaacuaaaagaaaacggaguaauaaacuacucaguauuagauuuaacagcagaagaauuagaagcaauaaaacaucaacuaaauccuaaggauaaugauguagaacucuaaggacuaguggaagcauuuuccuggcugauuaaaagaaauuacucagcuauggucaucuguuccuguuagaaggcuaugcagcauauuauauacuaugcgcauguuaugaaaugcauaauaaaaaauuuuaaaaaaucuaaaagaucuaaaaaaaaaaaaaaaaaaaaaaaaaaaaaaaaaaaaaaaaaaaaaaaaaaaaaaaaaaaaaaaaugcaucccccccccccccccccccccccccccccccaaaggcucuuuucagagccaccagaauu

SEQ ID NO: 20533 - RNA, 1550 nt, Artificial Sequence
  mRNA product Design h-3 comprising derived and/or modified sequence from HRSV(Memphis-37)__AIY60635.1__N (opt11)
gggagacccgugacccggaaguuguacggcuacgcgacuuucccucccacaaacccucgcgcccuuccuuuccuacuugggcccggcagaaagcuuaccauggcccuaagcaaagucaaacucaacgacacacuaaacaaagaccaacuccucagcuccagcaaauacaccauccaacgauccaccggcgacuccauagacacccccaacuacgacguccaaaaacacaucaacaaacuaugcggcaugcuccuaaucacagaagacgccaaccacaaauucaccggagucaucggcaugcucuacgccaugagccgccucggccgagaagacacaaucaaaauacuaagagacgccggcuaccacguaaaagccaacggcguagacguaaccacccaccgccaagacaucaacggcaaagaaaugaaauucgaaguucucacccucgccucacuaaccacggaaauccaaauaaacauugaaaucgaaagcagaaaauccuacaaaaagaugcuaaaagaaaugggcgagguagccccagaauaccgccacgacagccccgacugcggaaugaucauccucugcauugcagcccucgucaucaccaaacuagccgccggcgacagaagcggccuaaccgcaguaauccgccgagccaacaacguacucaaaaacgaaaugaaacgcuacaaaggccuccuccccaaagacaucgccaacagcuucuacgaaguauucgaaaaauacccgcacuucaucgacgucuucguacacuucggcauagcccaaagcagcacacgaggcggcucccgcgucgaaggaauauucgccggccuguucaugaacgcauacggagcgggccaagucaugcuccgcugggguguacuagccaaguccgucaaaaacaucaugcuagggcacgcaagcguacaagccgaaauggaacaaguagucgaagucuacgaauacgcacaaaaacuaggcggcgaagccggcuucuaccacauccuaaacaaccccaaagccucauuacucucccucacccaauuuccucacuucuccagcgucguccucggaaacgccgccggccuaggcauaaugggggaauaccgcggcaccccgcgcaaccaagaccucuacgacgcagcaaaagccuacgcagaacaacuaaaagaaaacggagucaucaacuacagcguacuggaccuaaccgccgaagaacucgaagccauaaaacaccaacucaaccccaaagacaacgacgucgagcucuaaggacuaguggaagcauuuuccuggcugauuaaaagaaauuacucagcuauggucaucuguuccuguuagaaggcuaugcagcauauuauauacuaugcgcauguuaugaaaugcauaauaaaaaauuuuaaaaaaucuaaaagaucuaaaaaaaaaaaaaaaaaaaaaaaaaaaaaaaaaaaaaaaaaaaaaaaaaaaaaaaaaaaaaaaaugcaucccccccccccccccccccccccccccccccaaaggcucuuuucagagccaccagaauu

SEQ ID NO: 20534 - RNA, 1613 nt, Artificial Sequence
  mRNA product Design h-4 comprising derived and/or modified sequence from HRSV(Memphis-37)__AIY60635.1__N (wt)
gggagagggcgcuuggcuugcaaggacccugagcugcggcauugaagcacacccaacccaacucgacugaagucagccucacugaaccggaucugagaaucuucucucucugggcuugccagggcucuccgaaccuagcuagcauccucuucaauuccaacuagaaagcuuaccauggcucuuagcaaagucaaguugaacgauacacucaacaaagaucaacuucugucauccagcaaauacaccauccaacggagcacaggagauaguauugauacuccuaauuaugaugugcagaaacacaucaacaaguuauguggcauguuauuaaucacagaagaugcuaaucauaaauucacugggguaauagguauguuauaugcuaugucuagauuaggaagagaagacaccauaaaaauacucagagaugcgggauaucauguaaaagcaaauggaguggauguaacaacacaucgucaagacauuaauggaaaagaaaugaaauuugaaguguuaacauuggcaagcuuaacaacugaaauucaaaucaacauugagauagaaucuaggaaauccuacaaaaaaaugcuaaaagaaaugggagagguggcuccagaauacaggcaugacucuccugauuguggaaugauaauauuauguauagcagcauuaguaauaaccaaauuagcagcaggggauagaucuggucuuacugcugugauuaggagagcuaauaauguucuaaaaaaugaaaugaaacguuauaaaggcuuacuaccaaaggauauagccaacagcuucuaugaaguguuugaaaaauauccucacuuuauagauguuuuuguucauuuugguauagcacaaucuucuaccagagguggcaguagaguugaagggauuuuugcaggauuguuuaugaaugccuauggugcagggcaagugauguuacgguggggagucuuagcaaaaucaguuaaaaauauuaugcuaggacaugcuagugugcaagcagaaauggaacaaguuguggaaguuuaugaauaugcccaaaaauuggguggagaagcaggauucuaccauauauugaacaauccaaaagcaucauuauuaucuuugacucaauuuccccacuucuccaguguaguauugggcaaugcugcuggccuaggcauaaugggagaauacagagguacaccaaggaaucaagaucuauaugaugcugcaaaggcauaugcugaacaacucaaagaaaauggugugauuaacuacaguguauuagacuugacagcagaagaacuagaggcuaucaaacaucagcuuaauccaaaagauaaugauguagagcuuugaggacuaguaauaaggaaacuguaugaaugucugugggcaggaagugaagagauccuucuguaaagguuuuuggaauuaugucugcugaauaauaaacuuuuuugaaauaauaaaucugguagaaaaaugagaucuaaaaaaaaaaaaaaaaaaaaaaaaaaaaaaaaaaaaaaaaaaaaaaaaaaaaaaaaaaaaaaaaugcaucccccccccccccccccccccccccccccccaaaggcucuuuucagagccaccagaauu

SEQ ID NO: 20535 - RNA, 1613 nt, Artificial Sequence
  mRNA product Design h-4 comprising derived and/or modified sequence from HRSV(Memphis-37)__AIY60635.1__N (opt1)
gggagagggcgcuuggcuugcaaggacccugagcugcggcauugaagcacacccaacccaacucgacugaagucagccucacugaaccggaucugagaaucuucucucucugggcuugccagggcucuccgaaccuagcuagcauccucuucaauuccaacuagaaagcuuaccauggcccugagcaaggugaagcucaacgacacccugaacaaggaccagcugcucuccagcuccaaguacaccauccagcgcagcaccggcgacuccaucgacacccccaacuacgacguccagaagcacaucaacaagcugugcgggaugcugcucaucaccgaggacgccaaccacaaguucaccggcgugaucgggaugcuguacgcgaugagccggcugggccgcgaggacacgaucaagauccuccgggacgccggguaccacgugaaggccaacggcgucgacgugaccacccaccgccaggacaucaacggcaaggagaugaaguucgaggugcugacccuggccucccucacgaccgagauccagaucaacaucgagaucgagagccggaaguccuacaagaagaugcugaaggagaugggggaggucgccccggaguaccgccacgacagccccgacugcggcaugaucauccugugcaucgcggcccucgugaucaccaagcuggccgccggggaccgguccggccugaccgcggugauccgccgggccaacaacguccucaagaacgagaugaagcgcuacaaggggcugcugcccaaggacaucgccaacagcuucuacgagguguucgagaaguacccccacuucaucgacguguucguccacuucggcaucgcccaguccagcacgcggggcgggucccgcguggagggcaucuucgccgggcuguucaugaacgcguacggcgccggccaggugaugcugcgguggggcguccuggccaagagcgugaagaacaucaugcucgggcacgccuccgugcaggccgagauggagcaggucguggagguguacgaguacgcgcagaagcucgggggcgaggccggguucuaccacauccugaacaacccgaaggccagccuccugucccugacccaguucccccacuucagcagcgucgugcucggcaacgccgccggccuggggaucaugggcgaguaccgcgggacgccccggaaccaggaccuguacgacgcggccaaggccuacgccgagcagcucaaggagaacggcgugaucaacuacuccguccuggaccugaccgccgaggagcucgaggcgaucaagcaccagcugaaccccaaggacaacgacguggagcugugaggacuaguaauaaggaaacuguaugaaugucugugggcaggaagugaagagauccuucuguaaagguuuuuggaauuaugucugcugaauaauaaacuuuuuugaaauaauaaaucugguagaaaaaugagaucuaaaaaaaaaaaaaaaaaaaaaaaaaaaaaaaaaaaaaaaaaaaaaaaaaaaaaaaaaaaaaaaaugcaucccccccccccccccccccccccccccccccaaaggcucuuuucagagccaccagaauu

SEQ ID NO: 20536 - RNA, 1613 nt, Artificial Sequence
  mRNA product Design h-4 comprising derived and/or modified sequence from HRSV(Memphis-37)__AIY60635.1__N (opt2)
gggagagggcgcuuggcuugcaaggacccugagcugcggcauugaagcacacccaacccaacucgacugaagucagccucacugaaccggaucugagaaucuucucucucugggcuugccagggcucuccgaaccuagcuagcauccucuucaauuccaacuagaaagcuuaccauggcccucuccaaggucaagcucaacgacacccucaacaaggaccagcuccucuccuccuccaaguacaccauccagcgcuccaccggcgacuccaucgacacccccaacuacgacguccagaagcacaucaacaagcucugcggcaugcuccucaucaccgaggacgccaaccacaaguucaccggcgucaucggcaugcucuacgccaugucccgccucggccgcgaggacaccaucaagauccuccgcgacgccggcuaccacgucaaggccaacggcgucgacgucaccacccaccgccaggacaucaacggcaaggagaugaaguucgagguccucacccucgccucccucaccaccgagauccagaucaacaucgagaucgagucccgcaaguccuacaagaagaugcucaaggagaugggcgaggucgcccccgaguaccgccacgacucccccgacugcggcaugaucauccucugcaucgccgcccucgucaucaccaagcucgccgccggcgaccgcuccggccucaccgccgucauccgccgcgccaacaacguccucaagaacgagaugaagcgcuacaagggccuccuccccaaggacaucgccaacuccuucuacgaggucuucgagaaguacccccacuucaucgacgucuucguccacuucggcaucgcccaguccuccacccgcggcggcucccgcgucgagggcaucuucgccggccucuucaugaacgccuacggcgccggccaggucaugcuccgcuggggcguccucgccaaguccgucaagaacaucaugcucggccacgccuccguccaggccgagauggagcaggucgucgaggucuacgaguacgcccagaagcucggcggcgaggccggcuucuaccacauccucaacaaccccaaggccucccuccucucccucacccaguucccccacuucuccuccgucguccucggcaacgccgccggccucggcaucaugggcgaguaccgcggcaccccccgcaaccaggaccucuacgacgccgccaaggccuacgccgagcagcucaaggagaacggcgucaucaacuacuccguccucgaccucaccgccgaggagcucgaggccaucaagcaccagcucaaccccaaggacaacgacgucgagcucugaggacuaguaauaaggaaacuguaugaaugucugugggcaggaagugaagagauccuucuguaaagguuuuuggaauuaugucugcugaauaauaaacuuuuuugaaauaauaaaucugguagaaaaaugagaucuaaaaaaaaaaaaaaaaaaaaaaaaaaaaaaaaaaaaaaaaaaaaaaaaaaaaaaaaaaaaaaaaugcaucccccccccccccccccccccccccccccccaaaggcucuuuucagagccaccagaauu

SEQ ID NO: 20537 - RNA, 1613 nt, Artificial Sequence
  mRNA product Design h-4 comprising derived and/or modified sequence from HRSV(Memphis-37)__AIY60635.1__N (opt3)
gggagagggcgcuuggcuugcaaggacccugagcugcggcauugaagcacacccaacccaacucgacugaagucagccucacugaaccggaucugagaaucuucucucucugggcuugccagggcucuccgaaccuagcuagcauccucuucaauuccaacuagaaagcuuaccauggcccugagcaaggugaaacucaacgacacccuuaauaaggaucagcuguuguccucuucaaaauacacaauccaaagaaguacuggcgacagcauugauacgcccaacuaugacguccagaagcacauaaauaaauuaugcgggaugcugcuaaucaccgaggaugcuaaccauaaguucacaggaguuauugguaugcucuacgcaauguccaggcugggccgggaagacacuaucaagauucuucgcgaugccggguaucacgugaaagcgaauggaguagacgugaccacacaucgacaggauaucaacggcaaggagaugaaauuugaaguccugaccuuggcuucucucacuacagagauacagaucaauauugaaaucgagucgcguaagucauacaaaaagaugcugaaggagaugggugaaguggccccugaguauagacacgacagcccagauugugggaugauuauccugugcauagcagcccucguuauuaccaaauuagcugcaggagacaggaguggccugacggccgugauccggcgcgcuaacaauguccuuaagaacgaaaugaaaagauacaagggcuugcugccgaaagauauugccaauuccuucuaugagguguuugagaaguacccccauuucaucgacguauuuguucacuucgggaucgcgcaaucuagcacuaggggagguucccggguggaaggcauuuuugcagggcuauucaugaacgccuacggagcuggccaggucaugcuccgcuggggugugcuggccaaaucagugaagaauauaaugcuugggcacgcaaguguccaggcugagauggaacagguuguggagguauaugaauacgcccaaaagcugggaggcgaggcgggcuuuuaucauaucuugaacaauccuaaagccagccuccugucuuuaacccaguucccacacuuuuccucagugguccuggggaacgcagcuggacucgguauuaugggcgaguaccgagggacacccagaaaccaggaccuuuaugaugccgcuaaggccuacgcagaacagcugaaagagaauggagugaucaacuauagcguuuuggaccuaacugccgaggaacuggaagcuauaaagcaucaacucaauccuaaagauaacgacguggagcugugaggacuaguaauaaggaaacuguaugaaugucugugggcaggaagugaagagauccuucuguaaagguuuuuggaauuaugucugcugaauaauaaacuuuuuugaaauaauaaaucugguagaaaaaugagaucuaaaaaaaaaaaaaaaaaaaaaaaaaaaaaaaaaaaaaaaaaaaaaaaaaaaaaaaaaaaaaaaaugcaucccccccccccccccccccccccccccccccaaaggcucuuuucagagccaccagaauu

SEQ ID NO: 20538 - RNA, 1613 nt, Artificial Sequence
  mRNA product Design h-4 comprising derived and/or modified sequence from HRSV(Memphis-37)__AIY60635.1__N (opt4)
gggagagggcgcuuggcuugcaaggacccugagcugcggcauugaagcacacccaacccaacucgacugaagucagccucacugaaccggaucugagaaucuucucucucugggcuugccagggcucuccgaaccuagcuagcauccucuucaauuccaacuagaaagcuuaccauggcccugagcaaggugaagcugaacgacacccugaacaaggaccagcugcugagcagcagcaaguacaccauccagagaagcaccggcgacagcaucgacacccccaacuacgacgugcagaagcacaucaacaagcugugcggcaugcugcugaucaccgaggacgccaaccacaaguucaccggcgugaucggcaugcuguacgccaugagcagacugggcagagaggacaccaucaagauccugagagacgccggcuaccacgugaaggccaacggcguggacgugaccacccacagacaggacaucaacggcaaggagaugaaguucgaggugcugacccuggccagccugaccaccgagauccagaucaacaucgagaucgagagcagaaagagcuacaagaagaugcugaaggagaugggcgagguggcccccgaguacagacacgacagccccgacugcggcaugaucauccugugcaucgccgcccuggugaucaccaagcuggccgccggcgacagaagcggccugaccgccgugaucagaagagccaacaacgugcugaagaacgagaugaagagauacaagggccugcugcccaaggacaucgccaacagcuucuacgagguguucgagaaguacccccacuucaucgacguguucgugcacuucggcaucgcccagagcagcaccagaggcggcagcagaguggagggcaucuucgccggccuguucaugaacgccuacggcgccggccaggugaugcugagauggggcgugcuggccaagagcgugaagaacaucaugcugggccacgccagcgugcaggccgagauggagcaggugguggagguguacgaguacgcccagaagcugggcggcgaggccggcuucuaccacauccugaacaaccccaaggccagccugcugagccugacccaguucccccacuucagcagcguggugcugggcaacgccgccggccugggcaucaugggcgaguacagaggcacccccagaaaccaggaccuguacgacgccgccaaggccuacgccgagcagcugaaggagaacggcgugaucaacuacagcgugcuggaccugaccgccgaggagcuggaggccaucaagcaccagcugaaccccaaggacaacgacguggagcugugaggacuaguaauaaggaaacuguaugaaugucugugggcaggaagugaagagauccuucuguaaagguuuuuggaauuaugucugcugaauaauaaacuuuuuugaaauaauaaaucugguagaaaaaugagaucuaaaaaaaaaaaaaaaaaaaaaaaaaaaaaaaaaaaaaaaaaaaaaaaaaaaaaaaaaaaaaaaaugcaucccccccccccccccccccccccccccccccaaaggcucuuuucagagccaccagaauu

SEQ ID NO: 20539 - RNA, 1613 nt, Artificial Sequence
  mRNA product Design h-4 comprising derived and/or modified sequence from HRSV(Memphis-37)__AIY60635.1__N (opt5)
gggagagggcgcuuggcuugcaaggacccugagcugcggcauugaagcacacccaacccaacucgacugaagucagccucacugaaccggaucugagaaucuucucucucugggcuugccagggcucuccgaaccuagcuagcauccucuucaauuccaacuagaaagcuuaccauggcccugagcaaggugaaacucaacgacacccugaauaaggaucagcuucuguccucuagcaaauacacaauccaaagauccacgggcgacucuauugauacccccaacuaugacguccagaagcacaucaauaaacucugcgggaugcugcuuauuacagaggaugcuaaccauaaguucaccggaguuaucggcaugcuguacgccaugagccggcucgggcgcgaagacacaauuaagauccugagagaugcgggauaucacgugaaagcuaauggcguggacgucaccacacaucggcaggauaucaacgggaaggagaugaaauuugaagugcugacccucgccucccugacgaccgagauucagaucaauauugaaaucgagucucgcaagagcuacaaaaagaugcuuaaggagaugggagaaguugccccugaguauagacacgacuccccggauuguggcaugauuauccugugcauugcugcccucgugaucacaaaacuggcugccggcgaccggagcgggcuuaccgcggucauccgcagagccaacaaugugcugaagaacgaaaugaaacgguacaagggacuccugcccaaagauauugcuaauucuuucuaugagguuuuugagaaguacccucauuucaucgacguguuuguccacuucggcauugcccaauccagcacacgcgggggaucuagaguggaaggcaucuuugcugggcuguucaugaacgccuacggagcgggccaggugaugcuccgguggggcguccuggccaaauccguuaagaauauuaugcuugggcacgcuagcgugcaggccgagauggaacagguggucgagguguaugaauacgcucaaaagcugggaggcgaggccggguuuuaucauauccucaacaaucccaaagccucucugcuuucccugacccaguucccucacuuuagcuccguugugcucggaaacgcugcgggccuggggaucaugggagaguaccgcggcacgcccagaaaccaggaccuguaugaugccgcuaaggccuacgccgaacagcucaaagagaauggcgucauuaacuauucugugcuggaccuuacagcugaggaacuggaagccaucaagcaucaacucaauccuaaagauaacgacguugagcugugaggacuaguaauaaggaaacuguaugaaugucugugggcaggaagugaagagauccuucuguaaagguuuuuggaauuaugucugcugaauaauaaacuuuuuugaaauaauaaaucugguagaaaaaugagaucuaaaaaaaaaaaaaaaaaaaaaaaaaaaaaaaaaaaaaaaaaaaaaaaaaaaaaaaaaaaaaaaaugcaucccccccccccccccccccccccccccccccaaaggcucuuuucagagccaccagaauu

SEQ ID NO: 20540 - RNA, 1613 nt, Artificial Sequence
  mRNA product Design h-4 comprising derived and/or modified sequence from HRSV(Memphis-37)__AIY60635.1__N (opt6)
gggagagggcgcuuggcuugcaaggacccugagcugcggcauugaagcacacccaacccaacucgacugaagucagccucacugaaccggaucugagaaucuucucucucugggcuugccagggcucuccgaaccuagcuagcauccucuucaauuccaacuagaaagcuuaccauggccuuaaguaaaguaaaauuaaacgacacacuaaacaaagaccaauuacucucaucaucgaaauauacaauacaaagauccacaggagacuccauagauacaccaaauuacgacguacaaaaacauauaaacaaacucugcggaauguuauuaauaacagaagacgcaaaccacaaauucacaggagucauagguaugcuauacgcaaugucaagauuaggaagagaagauacaauaaaaauacuaagagacgcaggauaccacguaaaagcaaacggaguagacguaacaacacauagacaagauauaaacgguaaagaaaugaaauucgaaguacuaacacuagccagucuaacaacagaaauacaaauaaacauagaaauagaaagccgaaaaucauacaaaaaaauguuaaaagaaaugggggaaguagcacccgaauacagacaugauucaccugacugcggaaugauaauacucugcauagcggcauuagucauaacaaaacuagccgcaggagacagaagcggauuaacagcaguaauaagaagagcaaauaauguauuaaaaaaugaaaugaaaagguauaaaggauuacuaccaaaagauauagcaaacucauucuaugaaguuuucgaaaaauacccacacuucauagacgucuucguacacuuuggaauagcacaaagcagcacaagaggaggaagcagaguagaaggaauauucgcaggacuauucaugaaugcauacggagccggacaaguaaugcuaagauggggaguuuuagcaaaaagcguaaaaaacauaauguuaggacacgccuccguccaagccgaaauggaacaaguaguagaaguauacgaauaugcacaaaaacuaggaggagaagcaggauucuaucacauacucaauaacccaaaagcaucacuauugagcuuaacacaauucccacauuuuucauccguaguccuaggaaaugcagcaggcuuaggaauaaugggagaauacagaggcacaccaagaaaucaagacuuauacgaugcagcaaaagcauacgcagaacaacuaaaagaaaacggaguaauaaacuacucaguauuagauuuaacagcagaagaauuagaagcaauaaaacaucaacuaaauccuaaggauaaugauguagaacucuaaggacuaguaauaaggaaacuguaugaaugucugugggcaggaagugaagagauccuucuguaaagguuuuuggaauuaugucugcugaauaauaaacuuuuuugaaauaauaaaucugguagaaaaaugagaucuaaaaaaaaaaaaaaaaaaaaaaaaaaaaaaaaaaaaaaaaaaaaaaaaaaaaaaaaaaaaaaaaugcaucccccccccccccccccccccccccccccccaaaggcucuuuucagagccaccagaauu

SEQ ID NO: 20541 - RNA, 1613 nt, Artificial Sequence
  mRNA product Design h-4 comprising derived and/or modified sequence from HRSV(Memphis-37)__AIY60635.1__N (opt11)
gggagagggcgcuuggcuugcaaggacccugagcugcggcauugaagcacacccaacccaacucgacugaagucagccucacugaaccggaucugagaaucuucucucucugggcuugccagggcucuccgaaccuagcuagcauccucuucaauuccaacuagaaagcuuaccauggcccuaagcaaagucaaacucaacgacacacuaaacaaagaccaacuccucagcuccagcaaauacaccauccaacgauccaccggcgacuccauagacacccccaacuacgacguccaaaaacacaucaacaaacuaugcggcaugcuccuaaucacagaagacgccaaccacaaauucaccggagucaucggcaugcucuacgccaugagccgccucggccgagaagacacaaucaaaauacuaagagacgccggcuaccacguaaaagccaacggcguagacguaaccacccaccgccaagacaucaacggcaaagaaaugaaauucgaaguucucacccucgccucacuaaccacggaaauccaaauaaacauugaaaucgaaagcagaaaauccuacaaaaagaugcuaaaagaaaugggcgagguagccccagaauaccgccacgacagccccgacugcggaaugaucauccucugcauugcagcccucgucaucaccaaacuagccgccggcgacagaagcggccuaaccgcaguaauccgccgagccaacaacguacucaaaaacgaaaugaaacgcuacaaaggccuccuccccaaagacaucgccaacagcuucuacgaaguauucgaaaaauacccgcacuucaucgacgucuucguacacuucggcauagcccaaagcagcacacgaggcggcucccgcgucgaaggaauauucgccggccuguucaugaacgcauacggagcgggccaagucaugcuccgcugggguguacuagccaaguccgucaaaaacaucaugcuagggcacgcaagcguacaagccgaaauggaacaaguagucgaagucuacgaauacgcacaaaaacuaggcggcgaagccggcuucuaccacauccuaaacaaccccaaagccucauuacucucccucacccaauuuccucacuucuccagcgucguccucggaaacgccgccggccuaggcauaaugggggaauaccgcggcaccccgcgcaaccaagaccucuacgacgcagcaaaagccuacgcagaacaacuaaaagaaaacggagucaucaacuacagcguacuggaccuaaccgccgaagaacucgaagccauaaaacaccaacucaaccccaaagacaacgacgucgagcucuaaggacuaguaauaaggaaacuguaugaaugucugugggcaggaagugaagagauccuucuguaaagguuuuuggaauuaugucugcugaauaauaaacuuuuuugaaauaauaaaucugguagaaaaaugagaucuaaaaaaaaaaaaaaaaaaaaaaaaaaaaaaaaaaaaaaaaaaaaaaaaaaaaaaaaaaaaaaaaugcaucccccccccccccccccccccccccccccccaaaggcucuuuucagagccaccagaauu

SEQ ID NO: 20542 - RNA, 1629 nt, Artificial Sequence
  mRNA product Design h-5 comprising derived and/or modified sequence from HRSV(Memphis-37)__AIY60635.1__N (wt)
gggagagggcgcuuggcuugcaaggacccugagcugcggcauugaagcacacccaacccaacucgacugaagucagccucacugaaccggaucugagaaucuucucucucugggcuugccagggcucuccgaaccuagcuagcauccucuucaauuccaacuagaaagcuuaccauggcucuuagcaaagucaaguugaacgauacacucaacaaagaucaacuucugucauccagcaaauacaccauccaacggagcacaggagauaguauugauacuccuaauuaugaugugcagaaacacaucaacaaguuauguggcauguuauuaaucacagaagaugcuaaucauaaauucacugggguaauagguauguuauaugcuaugucuagauuaggaagagaagacaccauaaaaauacucagagaugcgggauaucauguaaaagcaaauggaguggauguaacaacacaucgucaagacauuaauggaaaagaaaugaaauuugaaguguuaacauuggcaagcuuaacaacugaaauucaaaucaacauugagauagaaucuaggaaauccuacaaaaaaaugcuaaaagaaaugggagagguggcuccagaauacaggcaugacucuccugauuguggaaugauaauauuauguauagcagcauuaguaauaaccaaauuagcagcaggggauagaucuggucuuacugcugugauuaggagagcuaauaauguucuaaaaaaugaaaugaaacguuauaaaggcuuacuaccaaaggauauagccaacagcuucuaugaaguguuugaaaaauauccucacuuuauagauguuuuuguucauuuugguauagcacaaucuucuaccagagguggcaguagaguugaagggauuuuugcaggauuguuuaugaaugccuauggugcagggcaagugauguuacgguggggagucuuagcaaaaucaguuaaaaauauuaugcuaggacaugcuagugugcaagcagaaauggaacaaguuguggaaguuuaugaauaugcccaaaaauuggguggagaagcaggauucuaccauauauugaacaauccaaaagcaucauuauuaucuuugacucaauuuccccacuucuccaguguaguauugggcaaugcugcuggccuaggcauaaugggagaauacagagguacaccaaggaaucaagaucuauaugaugcugcaaaggcauaugcugaacaacucaaagaaaauggugugauuaacuacaguguauuagacuugacagcagaagaacuagaggcuaucaaacaucagcuuaauccaaaagauaaugauguagagcuuugaggacuaguacuggcugcaucucccuuuccucuguccuccauccuucucccaggauggugaagggggaccugguacccagugauccccaccccaggauccuaaaucaugacuuaccugcuaauaaaaacucauuggaaaagugagaagaucuaaaaaaaaaaaaaaaaaaaaaaaaaaaaaaaaaaaaaaaaaaaaaaaaaaaaaaaaaaaaaaaaugcaucccccccccccccccccccccccccccccccaaaggcucuuuucagagccaccagaauu

SEQ ID NO: 20543 - RNA, 1629 nt, Artificial Sequence
  mRNA product Design h-5 comprising derived and/or modified sequence from HRSV(Memphis-37)__AIY60635.1__N (opt1)
gggagagggcgcuuggcuugcaaggacccugagcugcggcauugaagcacacccaacccaacucgacugaagucagccucacugaaccggaucugagaaucuucucucucugggcuugccagggcucuccgaaccuagcuagcauccucuucaauuccaacuagaaagcuuaccauggcccugagcaaggugaagcucaacgacacccugaacaaggaccagcugcucuccagcuccaaguacaccauccagcgcagcaccggcgacuccaucgacacccccaacuacgacguccagaagcacaucaacaagcugugcgggaugcugcucaucaccgaggacgccaaccacaaguucaccggcgugaucgggaugcuguacgcgaugagccggcugggccgcgaggacacgaucaagauccuccgggacgccggguaccacgugaaggccaacggcgucgacgugaccacccaccgccaggacaucaacggcaaggagaugaaguucgaggugcugacccuggccucccucacgaccgagauccagaucaacaucgagaucgagagccggaaguccuacaagaagaugcugaaggagaugggggaggucgccccggaguaccgccacgacagccccgacugcggcaugaucauccugugcaucgcggcccucgugaucaccaagcuggccgccggggaccgguccggccugaccgcggugauccgccgggccaacaacguccucaagaacgagaugaagcgcuacaaggggcugcugcccaaggacaucgccaacagcuucuacgagguguucgagaaguacccccacuucaucgacguguucguccacuucggcaucgcccaguccagcacgcggggcgggucccgcguggagggcaucuucgccgggcuguucaugaacgcguacggcgccggccaggugaugcugcgguggggcguccuggccaagagcgugaagaacaucaugcucgggcacgccuccgugcaggccgagauggagcaggucguggagguguacgaguacgcgcagaagcucgggggcgaggccggguucuaccacauccugaacaacccgaaggccagccuccugucccugacccaguucccccacuucagcagcgucgugcucggcaacgccgccggccuggggaucaugggcgaguaccgcgggacgccccggaaccaggaccuguacgacgcggccaaggccuacgccgagcagcucaaggagaacggcgugaucaacuacuccguccuggaccugaccgccgaggagcucgaggcgaucaagcaccagcugaaccccaaggacaacgacguggagcugugaggacuaguacuggcugcaucucccuuuccucuguccuccauccuucucccaggauggugaagggggaccugguacccagugauccccaccccaggauccuaaaucaugacuuaccugcuaauaaaaacucauuggaaaagugagaagaucuaaaaaaaaaaaaaaaaaaaaaaaaaaaaaaaaaaaaaaaaaaaaaaaaaaaaaaaaaaaaaaaaugcaucccccccccccccccccccccccccccccccaaaggcucuuuucagagccaccagaauu

SEQ ID NO: 20544 - RNA, 1629 nt, Artificial Sequence
  mRNA product Design h-5 comprising derived and/or modified sequence from HRSV(Memphis-37)__AIY60635.1__N (opt2)
gggagagggcgcuuggcuugcaaggacccugagcugcggcauugaagcacacccaacccaacucgacugaagucagccucacugaaccggaucugagaaucuucucucucugggcuugccagggcucuccgaaccuagcuagcauccucuucaauuccaacuagaaagcuuaccauggcccucuccaaggucaagcucaacgacacccucaacaaggaccagcuccucuccuccuccaaguacaccauccagcgcuccaccggcgacuccaucgacacccccaacuacgacguccagaagcacaucaacaagcucugcggcaugcuccucaucaccgaggacgccaaccacaaguucaccggcgucaucggcaugcucuacgccaugucccgccucggccgcgaggacaccaucaagauccuccgcgacgccggcuaccacgucaaggccaacggcgucgacgucaccacccaccgccaggacaucaacggcaaggagaugaaguucgagguccucacccucgccucccucaccaccgagauccagaucaacaucgagaucgagucccgcaaguccuacaagaagaugcucaaggagaugggcgaggucgcccccgaguaccgccacgacucccccgacugcggcaugaucauccucugcaucgccgcccucgucaucaccaagcucgccgccggcgaccgcuccggccucaccgccgucauccgccgcgccaacaacguccucaagaacgagaugaagcgcuacaagggccuccuccccaaggacaucgccaacuccuucuacgaggucuucgagaaguacccccacuucaucgacgucuucguccacuucggcaucgcccaguccuccacccgcggcggcucccgcgucgagggcaucuucgccggccucuucaugaacgccuacggcgccggccaggucaugcuccgcuggggcguccucgccaaguccgucaagaacaucaugcucggccacgccuccguccaggccgagauggagcaggucgucgaggucuacgaguacgcccagaagcucggcggcgaggccggcuucuaccacauccucaacaaccccaaggccucccuccucucccucacccaguucccccacuucuccuccgucguccucggcaacgccgccggccucggcaucaugggcgaguaccgcggcaccccccgcaaccaggaccucuacgacgccgccaaggccuacgccgagcagcucaaggagaacggcgucaucaacuacuccguccucgaccucaccgccgaggagcucgaggccaucaagcaccagcucaaccccaaggacaacgacgucgagcucugaggacuaguacuggcugcaucucccuuuccucuguccuccauccuucucccaggauggugaagggggaccugguacccagugauccccaccccaggauccuaaaucaugacuuaccugcuaauaaaaacucauuggaaaagugagaagaucuaaaaaaaaaaaaaaaaaaaaaaaaaaaaaaaaaaaaaaaaaaaaaaaaaaaaaaaaaaaaaaaaugcaucccccccccccccccccccccccccccccccaaaggcucuuuucagagccaccagaauu

SEQ ID NO: 20545 - RNA, 1629 nt, Artificial Sequence
  mRNA product Design h-5 comprising derived and/or modified sequence from HRSV(Memphis-37)__AIY60635.1__N (opt3)
gggagagggcgcuuggcuugcaaggacccugagcugcggcauugaagcacacccaacccaacucgacugaagucagccucacugaaccggaucugagaaucuucucucucugggcuugccagggcucuccgaaccuagcuagcauccucuucaauuccaacuagaaagcuuaccauggcccugagcaaggugaaacucaacgacacccuuaauaaggaucagcuguuguccucuucaaaauacacaauccaaagaaguacuggcgacagcauugauacgcccaacuaugacguccagaagcacauaaauaaauuaugcgggaugcugcuaaucaccgaggaugcuaaccauaaguucacaggaguuauugguaugcucuacgcaauguccaggcugggccgggaagacacuaucaagauucuucgcgaugccggguaucacgugaaagcgaauggaguagacgugaccacacaucgacaggauaucaacggcaaggagaugaaauuugaaguccugaccuuggcuucucucacuacagagauacagaucaauauugaaaucgagucgcguaagucauacaaaaagaugcugaaggagaugggugaaguggccccugaguauagacacgacagcccagauugugggaugauuauccugugcauagcagcccucguuauuaccaaauuagcugcaggagacaggaguggccugacggccgugauccggcgcgcuaacaauguccuuaagaacgaaaugaaaagauacaagggcuugcugccgaaagauauugccaauuccuucuaugagguguuugagaaguacccccauuucaucgacguauuuguucacuucgggaucgcgcaaucuagcacuaggggagguucccggguggaaggcauuuuugcagggcuauucaugaacgccuacggagcuggccaggucaugcuccgcuggggugugcuggccaaaucagugaagaauauaaugcuugggcacgcaaguguccaggcugagauggaacagguuguggagguauaugaauacgcccaaaagcugggaggcgaggcgggcuuuuaucauaucuugaacaauccuaaagccagccuccugucuuuaacccaguucccacacuuuuccucagugguccuggggaacgcagcuggacucgguauuaugggcgaguaccgagggacacccagaaaccaggaccuuuaugaugccgcuaaggccuacgcagaacagcugaaagagaauggagugaucaacuauagcguuuuggaccuaacugccgaggaacuggaagcuauaaagcaucaacucaauccuaaagauaacgacguggagcugugaggacuaguacuggcugcaucucccuuuccucuguccuccauccuucucccaggauggugaagggggaccugguacccagugauccccaccccaggauccuaaaucaugacuuaccugcuaauaaaaacucauuggaaaagugagaagaucuaaaaaaaaaaaaaaaaaaaaaaaaaaaaaaaaaaaaaaaaaaaaaaaaaaaaaaaaaaaaaaaaugcaucccccccccccccccccccccccccccccccaaaggcucuuuucagagccaccagaauu

SEQ ID NO: 20546 - RNA, 1629 nt, Artificial Sequence
  mRNA product Design h-5 comprising derived and/or modified sequence from HRSV(Memphis-37)__AIY60635.1__N (opt4)
gggagagggcgcuuggcuugcaaggacccugagcugcggcauugaagcacacccaacccaacucgacugaagucagccucacugaaccggaucugagaaucuucucucucugggcuugccagggcucuccgaaccuagcuagcauccucuucaauuccaacuagaaagcuuaccauggcccugagcaaggugaagcugaacgacacccugaacaaggaccagcugcugagcagcagcaaguacaccauccagagaagcaccggcgacagcaucgacacccccaacuacgacgugcagaagcacaucaacaagcugugcggcaugcugcugaucaccgaggacgccaaccacaaguucaccggcgugaucggcaugcuguacgccaugagcagacugggcagagaggacaccaucaagauccugagagacgccggcuaccacgugaaggccaacggcguggacgugaccacccacagacaggacaucaacggcaaggagaugaaguucgaggugcugacccuggccagccugaccaccgagauccagaucaacaucgagaucgagagcagaaagagcuacaagaagaugcugaaggagaugggcgagguggcccccgaguacagacacgacagccccgacugcggcaugaucauccugugcaucgccgcccuggugaucaccaagcuggccgccggcgacagaagcggccugaccgccgugaucagaagagccaacaacgugcugaagaacgagaugaagagauacaagggccugcugcccaaggacaucgccaacagcuucuacgagguguucgagaaguacccccacuucaucgacguguucgugcacuucggcaucgcccagagcagcaccagaggcggcagcagaguggagggcaucuucgccggccuguucaugaacgccuacggcgccggccaggugaugcugagauggggcgugcuggccaagagcgugaagaacaucaugcugggccacgccagcgugcaggccgagauggagcaggugguggagguguacgaguacgcccagaagcugggcggcgaggccggcuucuaccacauccugaacaaccccaaggccagccugcugagccugacccaguucccccacuucagcagcguggugcugggcaacgccgccggccugggcaucaugggcgaguacagaggcacccccagaaaccaggaccuguacgacgccgccaaggccuacgccgagcagcugaaggagaacggcgugaucaacuacagcgugcuggaccugaccgccgaggagcuggaggccaucaagcaccagcugaaccccaaggacaacgacguggagcugugaggacuaguacuggcugcaucucccuuuccucuguccuccauccuucucccaggauggugaagggggaccugguacccagugauccccaccccaggauccuaaaucaugacuuaccugcuaauaaaaacucauuggaaaagugagaagaucuaaaaaaaaaaaaaaaaaaaaaaaaaaaaaaaaaaaaaaaaaaaaaaaaaaaaaaaaaaaaaaaaugcaucccccccccccccccccccccccccccccccaaaggcucuuuucagagccaccagaauu

SEQ ID NO: 20547 - RNA, 1629 nt, Artificial Sequence
  mRNA product Design h-5 comprising derived and/or modified sequence from HRSV(Memphis-37)__AIY60635.1__N (opt5)
gggagagggcgcuuggcuugcaaggacccugagcugcggcauugaagcacacccaacccaacucgacugaagucagccucacugaaccggaucugagaaucuucucucucugggcuugccagggcucuccgaaccuagcuagcauccucuucaauuccaacuagaaagcuuaccauggcccugagcaaggugaaacucaacgacacccugaauaaggaucagcuucuguccucuagcaaauacacaauccaaagauccacgggcgacucuauugauacccccaacuaugacguccagaagcacaucaauaaacucugcgggaugcugcuuauuacagaggaugcuaaccauaaguucaccggaguuaucggcaugcuguacgccaugagccggcucgggcgcgaagacacaauuaagauccugagagaugcgggauaucacgugaaagcuaauggcguggacgucaccacacaucggcaggauaucaacgggaaggagaugaaauuugaagugcugacccucgccucccugacgaccgagauucagaucaauauugaaaucgagucucgcaagagcuacaaaaagaugcuuaaggagaugggagaaguugccccugaguauagacacgacuccccggauuguggcaugauuauccugugcauugcugcccucgugaucacaaaacuggcugccggcgaccggagcgggcuuaccgcggucauccgcagagccaacaaugugcugaagaacgaaaugaaacgguacaagggacuccugcccaaagauauugcuaauucuuucuaugagguuuuugagaaguacccucauuucaucgacguguuuguccacuucggcauugcccaauccagcacacgcgggggaucuagaguggaaggcaucuuugcugggcuguucaugaacgccuacggagcgggccaggugaugcuccgguggggcguccuggccaaauccguuaagaauauuaugcuugggcacgcuagcgugcaggccgagauggaacagguggucgagguguaugaauacgcucaaaagcugggaggcgaggccggguuuuaucauauccucaacaaucccaaagccucucugcuuucccugacccaguucccucacuuuagcuccguugugcucggaaacgcugcgggccuggggaucaugggagaguaccgcggcacgcccagaaaccaggaccuguaugaugccgcuaaggccuacgccgaacagcucaaagagaauggcgucauuaacuauucugugcuggaccuuacagcugaggaacuggaagccaucaagcaucaacucaauccuaaagauaacgacguugagcugugaggacuaguacuggcugcaucucccuuuccucuguccuccauccuucucccaggauggugaagggggaccugguacccagugauccccaccccaggauccuaaaucaugacuuaccugcuaauaaaaacucauuggaaaagugagaagaucuaaaaaaaaaaaaaaaaaaaaaaaaaaaaaaaaaaaaaaaaaaaaaaaaaaaaaaaaaaaaaaaaugcaucccccccccccccccccccccccccccccccaaaggcucuuuucagagccaccagaauu

SEQ ID NO: 20548 - RNA, 1629 nt, Artificial Sequence
  mRNA product Design h-5 comprising derived and/or modified sequence from HRSV(Memphis-37)__AIY60635.1__N (opt6)
gggagagggcgcuuggcuugcaaggacccugagcugcggcauugaagcacacccaacccaacucgacugaagucagccucacugaaccggaucugagaaucuucucucucugggcuugccagggcucuccgaaccuagcuagcauccucuucaauuccaacuagaaagcuuaccauggccuuaaguaaaguaaaauuaaacgacacacuaaacaaagaccaauuacucucaucaucgaaauauacaauacaaagauccacaggagacuccauagauacaccaaauuacgacguacaaaaacauauaaacaaacucugcggaauguuauuaauaacagaagacgcaaaccacaaauucacaggagucauagguaugcuauacgcaaugucaagauuaggaagagaagauacaauaaaaauacuaagagacgcaggauaccacguaaaagcaaacggaguagacguaacaacacauagacaagauauaaacgguaaagaaaugaaauucgaaguacuaacacuagccagucuaacaacagaaauacaaauaaacauagaaauagaaagccgaaaaucauacaaaaaaauguuaaaagaaaugggggaaguagcacccgaauacagacaugauucaccugacugcggaaugauaauacucugcauagcggcauuagucauaacaaaacuagccgcaggagacagaagcggauuaacagcaguaauaagaagagcaaauaauguauuaaaaaaugaaaugaaaagguauaaaggauuacuaccaaaagauauagcaaacucauucuaugaaguuuucgaaaaauacccacacuucauagacgucuucguacacuuuggaauagcacaaagcagcacaagaggaggaagcagaguagaaggaauauucgcaggacuauucaugaaugcauacggagccggacaaguaaugcuaagauggggaguuuuagcaaaaagcguaaaaaacauaauguuaggacacgccuccguccaagccgaaauggaacaaguaguagaaguauacgaauaugcacaaaaacuaggaggagaagcaggauucuaucacauacucaauaacccaaaagcaucacuauugagcuuaacacaauucccacauuuuucauccguaguccuaggaaaugcagcaggcuuaggaauaaugggagaauacagaggcacaccaagaaaucaagacuuauacgaugcagcaaaagcauacgcagaacaacuaaaagaaaacggaguaauaaacuacucaguauuagauuuaacagcagaagaauuagaagcaauaaaacaucaacuaaauccuaaggauaaugauguagaacucuaaggacuaguacuggcugcaucucccuuuccucuguccuccauccuucucccaggauggugaagggggaccugguacccagugauccccaccccaggauccuaaaucaugacuuaccugcuaauaaaaacucauuggaaaagugagaagaucuaaaaaaaaaaaaaaaaaaaaaaaaaaaaaaaaaaaaaaaaaaaaaaaaaaaaaaaaaaaaaaaaugcaucccccccccccccccccccccccccccccccaaaggcucuuuucagagccaccagaauu

SEQ ID NO: 20549 - RNA, 1629 nt, Artificial Sequence
  mRNA product Design h-5 comprising derived and/or modified sequence from HRSV(Memphis-37)__AIY60635.1__N (opt11)
gggagagggcgcuuggcuugcaaggacccugagcugcggcauugaagcacacccaacccaacucgacugaagucagccucacugaaccggaucugagaaucuucucucucugggcuugccagggcucuccgaaccuagcuagcauccucuucaauuccaacuagaaagcuuaccauggcccuaagcaaagucaaacucaacgacacacuaaacaaagaccaacuccucagcuccagcaaauacaccauccaacgauccaccggcgacuccauagacacccccaacuacgacguccaaaaacacaucaacaaacuaugcggcaugcuccuaaucacagaagacgccaaccacaaauucaccggagucaucggcaugcucuacgccaugagccgccucggccgagaagacacaaucaaaauacuaagagacgccggcuaccacguaaaagccaacggcguagacguaaccacccaccgccaagacaucaacggcaaagaaaugaaauucgaaguucucacccucgccucacuaaccacggaaauccaaauaaacauugaaaucgaaagcagaaaauccuacaaaaagaugcuaaaagaaaugggcgagguagccccagaauaccgccacgacagccccgacugcggaaugaucauccucugcauugcagcccucgucaucaccaaacuagccgccggcgacagaagcggccuaaccgcaguaauccgccgagccaacaacguacucaaaaacgaaaugaaacgcuacaaaggccuccuccccaaagacaucgccaacagcuucuacgaaguauucgaaaaauacccgcacuucaucgacgucuucguacacuucggcauagcccaaagcagcacacgaggcggcucccgcgucgaaggaauauucgccggccuguucaugaacgcauacggagcgggccaagucaugcuccgcugggguguacuagccaaguccgucaaaaacaucaugcuagggcacgcaagcguacaagccgaaauggaacaaguagucgaagucuacgaauacgcacaaaaacuaggcggcgaagccggcuucuaccacauccuaaacaaccccaaagccucauuacucucccucacccaauuuccucacuucuccagcgucguccucggaaacgccgccggccuaggcauaaugggggaauaccgcggcaccccgcgcaaccaagaccucuacgacgcagcaaaagccuacgcagaacaacuaaaagaaaacggagucaucaacuacagcguacuggaccuaaccgccgaagaacucgaagccauaaaacaccaacucaaccccaaagacaacgacgucgagcucuaaggacuaguacuggcugcaucucccuuuccucuguccuccauccuucucccaggauggugaagggggaccugguacccagugauccccaccccaggauccuaaaucaugacuuaccugcuaauaaaaacucauuggaaaagugagaagaucuaaaaaaaaaaaaaaaaaaaaaaaaaaaaaaaaaaaaaaaaaaaaaaaaaaaaaaaaaaaaaaaaugcaucccccccccccccccccccccccccccccccaaaggcucuuuucagagccaccagaauu

SEQ ID NO: 20550 - RNA, 1562 nt, Artificial Sequence
  mRNA product Design i-1 comprising derived and/or modified sequence from HRSV(Memphis-37)__AIY60635.1__N (wt)
gggagagggcgcuuggcuugcaaggacccugagcugcggcauugaagcacacccaacccaacucgacugaagucagccucacugaaccggaucugagaaucuucucucucugggcuugccagggcucuccgaaccuagcuagcauccucuucaauuccaacuagaaagcuuaccauggcucuuagcaaagucaaguugaacgauacacucaacaaagaucaacuucugucauccagcaaauacaccauccaacggagcacaggagauaguauugauacuccuaauuaugaugugcagaaacacaucaacaaguuauguggcauguuauuaaucacagaagaugcuaaucauaaauucacugggguaauagguauguuauaugcuaugucuagauuaggaagagaagacaccauaaaaauacucagagaugcgggauaucauguaaaagcaaauggaguggauguaacaacacaucgucaagacauuaauggaaaagaaaugaaauuugaaguguuaacauuggcaagcuuaacaacugaaauucaaaucaacauugagauagaaucuaggaaauccuacaaaaaaaugcuaaaagaaaugggagagguggcuccagaauacaggcaugacucuccugauuguggaaugauaauauuauguauagcagcauuaguaauaaccaaauuagcagcaggggauagaucuggucuuacugcugugauuaggagagcuaauaauguucuaaaaaaugaaaugaaacguuauaaaggcuuacuaccaaaggauauagccaacagcuucuaugaaguguuugaaaaauauccucacuuuauagauguuuuuguucauuuugguauagcacaaucuucuaccagagguggcaguagaguugaagggauuuuugcaggauuguuuaugaaugccuauggugcagggcaagugauguuacgguggggagucuuagcaaaaucaguuaaaaauauuaugcuaggacaugcuagugugcaagcagaaauggaacaaguuguggaaguuuaugaauaugcccaaaaauuggguggagaagcaggauucuaccauauauugaacaauccaaaagcaucauuauuaucuuugacucaauuuccccacuucuccaguguaguauugggcaaugcugcuggccuaggcauaaugggagaauacagagguacaccaaggaaucaagaucuauaugaugcugcaaaggcauaugcugaacaacucaaagaaaauggugugauuaacuacaguguauuagacuugacagcagaagaacuagaggcuaucaaacaucagcuuaauccaaaagauaaugauguagagcuuugaggacuaguguccaccugucccuccugggcugcuggauugucucguuuuccugccaaauaaacaggaucagcgcuuuacagaucuaaaaaaaaaaaaaaaaaaaaaaaaaaaaaaaaaaaaaaaaaaaaaaaaaaaaaaaaaaaaaaaaugcaucccccccccccccccccccccccccccccccaaaggcucuuuucagagccaccagaauu

SEQ ID NO: 20551 - RNA, 1562 nt, Artificial Sequence
  mRNA product Design i-1 comprising derived and/or modified sequence from HRSV(Memphis-37)__AIY60635.1__N (opt1)
gggagagggcgcuuggcuugcaaggacccugagcugcggcauugaagcacacccaacccaacucgacugaagucagccucacugaaccggaucugagaaucuucucucucugggcuugccagggcucuccgaaccuagcuagcauccucuucaauuccaacuagaaagcuuaccauggcccugagcaaggugaagcucaacgacacccugaacaaggaccagcugcucuccagcuccaaguacaccauccagcgcagcaccggcgacuccaucgacacccccaacuacgacguccagaagcacaucaacaagcugugcgggaugcugcucaucaccgaggacgccaaccacaaguucaccggcgugaucgggaugcuguacgcgaugagccggcugggccgcgaggacacgaucaagauccuccgggacgccggguaccacgugaaggccaacggcgucgacgugaccacccaccgccaggacaucaacggcaaggagaugaaguucgaggugcugacccuggccucccucacgaccgagauccagaucaacaucgagaucgagagccggaaguccuacaagaagaugcugaaggagaugggggaggucgccccggaguaccgccacgacagccccgacugcggcaugaucauccugugcaucgcggcccucgugaucaccaagcuggccgccggggaccgguccggccugaccgcggugauccgccgggccaacaacguccucaagaacgagaugaagcgcuacaaggggcugcugcccaaggacaucgccaacagcuucuacgagguguucgagaaguacccccacuucaucgacguguucguccacuucggcaucgcccaguccagcacgcggggcgggucccgcguggagggcaucuucgccgggcuguucaugaacgcguacggcgccggccaggugaugcugcgguggggcguccuggccaagagcgugaagaacaucaugcucgggcacgccuccgugcaggccgagauggagcaggucguggagguguacgaguacgcgcagaagcucgggggcgaggccggguucuaccacauccugaacaacccgaaggccagccuccugucccugacccaguucccccacuucagcagcgucgugcucggcaacgccgccggccuggggaucaugggcgaguaccgcgggacgccccggaaccaggaccuguacgacgcggccaaggccuacgccgagcagcucaaggagaacggcgugaucaacuacuccguccuggaccugaccgccgaggagcucgaggcgaucaagcaccagcugaaccccaaggacaacgacguggagcugugaggacuaguguccaccugucccuccugggcugcuggauugucucguuuuccugccaaauaaacaggaucagcgcuuuacagaucuaaaaaaaaaaaaaaaaaaaaaaaaaaaaaaaaaaaaaaaaaaaaaaaaaaaaaaaaaaaaaaaaugcaucccccccccccccccccccccccccccccccaaaggcucuuuucagagccaccagaauu

SEQ ID NO: 20552 - RNA, 1562 nt, Artificial Sequence
  mRNA product Design i-1 comprising derived and/or modified sequence from HRSV(Memphis-37)__AIY60635.1__N (opt2)
gggagagggcgcuuggcuugcaaggacccugagcugcggcauugaagcacacccaacccaacucgacugaagucagccucacugaaccggaucugagaaucuucucucucugggcuugccagggcucuccgaaccuagcuagcauccucuucaauuccaacuagaaagcuuaccauggcccucuccaaggucaagcucaacgacacccucaacaaggaccagcuccucuccuccuccaaguacaccauccagcgcuccaccggcgacuccaucgacacccccaacuacgacguccagaagcacaucaacaagcucugcggcaugcuccucaucaccgaggacgccaaccacaaguucaccggcgucaucggcaugcucuacgccaugucccgccucggccgcgaggacaccaucaagauccuccgcgacgccggcuaccacgucaaggccaacggcgucgacgucaccacccaccgccaggacaucaacggcaaggagaugaaguucgagguccucacccucgccucccucaccaccgagauccagaucaacaucgagaucgagucccgcaaguccuacaagaagaugcucaaggagaugggcgaggucgcccccgaguaccgccacgacucccccgacugcggcaugaucauccucugcaucgccgcccucgucaucaccaagcucgccgccggcgaccgcuccggccucaccgccgucauccgccgcgccaacaacguccucaagaacgagaugaagcgcuacaagggccuccuccccaaggacaucgccaacuccuucuacgaggucuucgagaaguacccccacuucaucgacgucuucguccacuucggcaucgcccaguccuccacccgcggcggcucccgcgucgagggcaucuucgccggccucuucaugaacgccuacggcgccggccaggucaugcuccgcuggggcguccucgccaaguccgucaagaacaucaugcucggccacgccuccguccaggccgagauggagcaggucgucgaggucuacgaguacgcccagaagcucggcggcgaggccggcuucuaccacauccucaacaaccccaaggccucccuccucucccucacccaguucccccacuucuccuccgucguccucggcaacgccgccggccucggcaucaugggcgaguaccgcggcaccccccgcaaccaggaccucuacgacgccgccaaggccuacgccgagcagcucaaggagaacggcgucaucaacuacuccguccucgaccucaccgccgaggagcucgaggccaucaagcaccagcucaaccccaaggacaacgacgucgagcucugaggacuaguguccaccugucccuccugggcugcuggauugucucguuuuccugccaaauaaacaggaucagcgcuuuacagaucuaaaaaaaaaaaaaaaaaaaaaaaaaaaaaaaaaaaaaaaaaaaaaaaaaaaaaaaaaaaaaaaaugcaucccccccccccccccccccccccccccccccaaaggcucuuuucagagccaccagaauu

SEQ ID NO: 20553 - RNA, 1562 nt, Artificial Sequence
  mRNA product Design i-1 comprising derived and/or modified sequence from HRSV(Memphis-37)__AIY60635.1__N (opt3)
gggagagggcgcuuggcuugcaaggacccugagcugcggcauugaagcacacccaacccaacucgacugaagucagccucacugaaccggaucugagaaucuucucucucugggcuugccagggcucuccgaaccuagcuagcauccucuucaauuccaacuagaaagcuuaccauggcccugagcaaggugaaacucaacgacacccuuaauaaggaucagcuguuguccucuucaaaauacacaauccaaagaaguacuggcgacagcauugauacgcccaacuaugacguccagaagcacauaaauaaauuaugcgggaugcugcuaaucaccgaggaugcuaaccauaaguucacaggaguuauugguaugcucuacgcaauguccaggcugggccgggaagacacuaucaagauucuucgcgaugccggguaucacgugaaagcgaauggaguagacgugaccacacaucgacaggauaucaacggcaaggagaugaaauuugaaguccugaccuuggcuucucucacuacagagauacagaucaauauugaaaucgagucgcguaagucauacaaaaagaugcugaaggagaugggugaaguggccccugaguauagacacgacagcccagauugugggaugauuauccugugcauagcagcccucguuauuaccaaauuagcugcaggagacaggaguggccugacggccgugauccggcgcgcuaacaauguccuuaagaacgaaaugaaaagauacaagggcuugcugccgaaagauauugccaauuccuucuaugagguguuugagaaguacccccauuucaucgacguauuuguucacuucgggaucgcgcaaucuagcacuaggggagguucccggguggaaggcauuuuugcagggcuauucaugaacgccuacggagcuggccaggucaugcuccgcuggggugugcuggccaaaucagugaagaauauaaugcuugggcacgcaaguguccaggcugagauggaacagguuguggagguauaugaauacgcccaaaagcugggaggcgaggcgggcuuuuaucauaucuugaacaauccuaaagccagccuccugucuuuaacccaguucccacacuuuuccucagugguccuggggaacgcagcuggacucgguauuaugggcgaguaccgagggacacccagaaaccaggaccuuuaugaugccgcuaaggccuacgcagaacagcugaaagagaauggagugaucaacuauagcguuuuggaccuaacugccgaggaacuggaagcuauaaagcaucaacucaauccuaaagauaacgacguggagcugugaggacuaguguccaccugucccuccugggcugcuggauugucucguuuuccugccaaauaaacaggaucagcgcuuuacagaucuaaaaaaaaaaaaaaaaaaaaaaaaaaaaaaaaaaaaaaaaaaaaaaaaaaaaaaaaaaaaaaaaugcaucccccccccccccccccccccccccccccccaaaggcucuuuucagagccaccagaauu

SEQ ID NO: 20554 - RNA, 1562 nt, Artificial Sequence
  mRNA product Design i-1 comprising derived and/or modified sequence from HRSV(Memphis-37)__AIY60635.1__N (opt4)
gggagagggcgcuuggcuugcaaggacccugagcugcggcauugaagcacacccaacccaacucgacugaagucagccucacugaaccggaucugagaaucuucucucucugggcuugccagggcucuccgaaccuagcuagcauccucuucaauuccaacuagaaagcuuaccauggcccugagcaaggugaagcugaacgacacccugaacaaggaccagcugcugagcagcagcaaguacaccauccagagaagcaccggcgacagcaucgacacccccaacuacgacgugcagaagcacaucaacaagcugugcggcaugcugcugaucaccgaggacgccaaccacaaguucaccggcgugaucggcaugcuguacgccaugagcagacugggcagagaggacaccaucaagauccugagagacgccggcuaccacgugaaggccaacggcguggacgugaccacccacagacaggacaucaacggcaaggagaugaaguucgaggugcugacccuggccagccugaccaccgagauccagaucaacaucgagaucgagagcagaaagagcuacaagaagaugcugaaggagaugggcgagguggcccccgaguacagacacgacagccccgacugcggcaugaucauccugugcaucgccgcccuggugaucaccaagcuggccgccggcgacagaagcggccugaccgccgugaucagaagagccaacaacgugcugaagaacgagaugaagagauacaagggccugcugcccaaggacaucgccaacagcuucuacgagguguucgagaaguacccccacuucaucgacguguucgugcacuucggcaucgcccagagcagcaccagaggcggcagcagaguggagggcaucuucgccggccuguucaugaacgccuacggcgccggccaggugaugcugagauggggcgugcuggccaagagcgugaagaacaucaugcugggccacgccagcgugcaggccgagauggagcaggugguggagguguacgaguacgcccagaagcugggcggcgaggccggcuucuaccacauccugaacaaccccaaggccagccugcugagccugacccaguucccccacuucagcagcguggugcugggcaacgccgccggccugggcaucaugggcgaguacagaggcacccccagaaaccaggaccuguacgacgccgccaaggccuacgccgagcagcugaaggagaacggcgugaucaacuacagcgugcuggaccugaccgccgaggagcuggaggccaucaagcaccagcugaaccccaaggacaacgacguggagcugugaggacuaguguccaccugucccuccugggcugcuggauugucucguuuuccugccaaauaaacaggaucagcgcuuuacagaucuaaaaaaaaaaaaaaaaaaaaaaaaaaaaaaaaaaaaaaaaaaaaaaaaaaaaaaaaaaaaaaaaugcaucccccccccccccccccccccccccccccccaaaggcucuuuucagagccaccagaauu

SEQ ID NO: 20555 - RNA, 1562 nt, Artificial Sequence
  mRNA product Design i-1 comprising derived and/or modified sequence from HRSV(Memphis-37)__AIY60635.1__N (opt5)
gggagagggcgcuuggcuugcaaggacccugagcugcggcauugaagcacacccaacccaacucgacugaagucagccucacugaaccggaucugagaaucuucucucucugggcuugccagggcucuccgaaccuagcuagcauccucuucaauuccaacuagaaagcuuaccauggcccugagcaaggugaaacucaacgacacccugaauaaggaucagcuucuguccucuagcaaauacacaauccaaagauccacgggcgacucuauugauacccccaacuaugacguccagaagcacaucaauaaacucugcgggaugcugcuuauuacagaggaugcuaaccauaaguucaccggaguuaucggcaugcuguacgccaugagccggcucgggcgcgaagacacaauuaagauccugagagaugcgggauaucacgugaaagcuaauggcguggacgucaccacacaucggcaggauaucaacgggaaggagaugaaauuugaagugcugacccucgccucccugacgaccgagauucagaucaauauugaaaucgagucucgcaagagcuacaaaaagaugcuuaaggagaugggagaaguugccccugaguauagacacgacuccccggauuguggcaugauuauccugugcauugcugcccucgugaucacaaaacuggcugccggcgaccggagcgggcuuaccgcggucauccgcagagccaacaaugugcugaagaacgaaaugaaacgguacaagggacuccugcccaaagauauugcuaauucuuucuaugagguuuuugagaaguacccucauuucaucgacguguuuguccacuucggcauugcccaauccagcacacgcgggggaucuagaguggaaggcaucuuugcugggcuguucaugaacgccuacggagcgggccaggugaugcuccgguggggcguccuggccaaauccguuaagaauauuaugcuugggcacgcuagcgugcaggccgagauggaacagguggucgagguguaugaauacgcucaaaagcugggaggcgaggccggguuuuaucauauccucaacaaucccaaagccucucugcuuucccugacccaguucccucacuuuagcuccguugugcucggaaacgcugcgggccuggggaucaugggagaguaccgcggcacgcccagaaaccaggaccuguaugaugccgcuaaggccuacgccgaacagcucaaagagaauggcgucauuaacuauucugugcuggaccuuacagcugaggaacuggaagccaucaagcaucaacucaauccuaaagauaacgacguugagcugugaggacuaguguccaccugucccuccugggcugcuggauugucucguuuuccugccaaauaaacaggaucagcgcuuuacagaucuaaaaaaaaaaaaaaaaaaaaaaaaaaaaaaaaaaaaaaaaaaaaaaaaaaaaaaaaaaaaaaaaugcaucccccccccccccccccccccccccccccccaaaggcucuuuucagagccaccagaauu

SEQ ID NO: 20556 - RNA, 1562 nt, Artificial Sequence
  mRNA product Design i-1 comprising derived and/or modified sequence from HRSV(Memphis-37)__AIY60635.1__N (opt6)
gggagagggcgcuuggcuugcaaggacccugagcugcggcauugaagcacacccaacccaacucgacugaagucagccucacugaaccggaucugagaaucuucucucucugggcuugccagggcucuccgaaccuagcuagcauccucuucaauuccaacuagaaagcuuaccauggccuuaaguaaaguaaaauuaaacgacacacuaaacaaagaccaauuacucucaucaucgaaauauacaauacaaagauccacaggagacuccauagauacaccaaauuacgacguacaaaaacauauaaacaaacucugcggaauguuauuaauaacagaagacgcaaaccacaaauucacaggagucauagguaugcuauacgcaaugucaagauuaggaagagaagauacaauaaaaauacuaagagacgcaggauaccacguaaaagcaaacggaguagacguaacaacacauagacaagauauaaacgguaaagaaaugaaauucgaaguacuaacacuagccagucuaacaacagaaauacaaauaaacauagaaauagaaagccgaaaaucauacaaaaaaauguuaaaagaaaugggggaaguagcacccgaauacagacaugauucaccugacugcggaaugauaauacucugcauagcggcauuagucauaacaaaacuagccgcaggagacagaagcggauuaacagcaguaauaagaagagcaaauaauguauuaaaaaaugaaaugaaaagguauaaaggauuacuaccaaaagauauagcaaacucauucuaugaaguuuucgaaaaauacccacacuucauagacgucuucguacacuuuggaauagcacaaagcagcacaagaggaggaagcagaguagaaggaauauucgcaggacuauucaugaaugcauacggagccggacaaguaaugcuaagauggggaguuuuagcaaaaagcguaaaaaacauaauguuaggacacgccuccguccaagccgaaauggaacaaguaguagaaguauacgaauaugcacaaaaacuaggaggagaagcaggauucuaucacauacucaauaacccaaaagcaucacuauugagcuuaacacaauucccacauuuuucauccguaguccuaggaaaugcagcaggcuuaggaauaaugggagaauacagaggcacaccaagaaaucaagacuuauacgaugcagcaaaagcauacgcagaacaacuaaaagaaaacggaguaauaaacuacucaguauuagauuuaacagcagaagaauuagaagcaauaaaacaucaacuaaauccuaaggauaaugauguagaacucuaaggacuaguguccaccugucccuccugggcugcuggauugucucguuuuccugccaaauaaacaggaucagcgcuuuacagaucuaaaaaaaaaaaaaaaaaaaaaaaaaaaaaaaaaaaaaaaaaaaaaaaaaaaaaaaaaaaaaaaaugcaucccccccccccccccccccccccccccccccaaaggcucuuuucagagccaccagaauu

SEQ ID NO: 20557 - RNA, 1562 nt, Artificial Sequence
  mRNA product Design i-1 comprising derived and/or modified sequence from HRSV(Memphis-37)__AIY60635.1__N (opt11)
gggagagggcgcuuggcuugcaaggacccugagcugcggcauugaagcacacccaacccaacucgacugaagucagccucacugaaccggaucugagaaucuucucucucugggcuugccagggcucuccgaaccuagcuagcauccucuucaauuccaacuagaaagcuuaccauggcccuaagcaaagucaaacucaacgacacacuaaacaaagaccaacuccucagcuccagcaaauacaccauccaacgauccaccggcgacuccauagacacccccaacuacgacguccaaaaacacaucaacaaacuaugcggcaugcuccuaaucacagaagacgccaaccacaaauucaccggagucaucggcaugcucuacgccaugagccgccucggccgagaagacacaaucaaaauacuaagagacgccggcuaccacguaaaagccaacggcguagacguaaccacccaccgccaagacaucaacggcaaagaaaugaaauucgaaguucucacccucgccucacuaaccacggaaauccaaauaaacauugaaaucgaaagcagaaaauccuacaaaaagaugcuaaaagaaaugggcgagguagccccagaauaccgccacgacagccccgacugcggaaugaucauccucugcauugcagcccucgucaucaccaaacuagccgccggcgacagaagcggccuaaccgcaguaauccgccgagccaacaacguacucaaaaacgaaaugaaacgcuacaaaggccuccuccccaaagacaucgccaacagcuucuacgaaguauucgaaaaauacccgcacuucaucgacgucuucguacacuucggcauagcccaaagcagcacacgaggcggcucccgcgucgaaggaauauucgccggccuguucaugaacgcauacggagcgggccaagucaugcuccgcugggguguacuagccaaguccgucaaaaacaucaugcuagggcacgcaagcguacaagccgaaauggaacaaguagucgaagucuacgaauacgcacaaaaacuaggcggcgaagccggcuucuaccacauccuaaacaaccccaaagccucauuacucucccucacccaauuuccucacuucuccagcgucguccucggaaacgccgccggccuaggcauaaugggggaauaccgcggcaccccgcgcaaccaagaccucuacgacgcagcaaaagccuacgcagaacaacuaaaagaaaacggagucaucaacuacagcguacuggaccuaaccgccgaagaacucgaagccauaaaacaccaacucaaccccaaagacaacgacgucgagcucuaaggacuaguguccaccugucccuccugggcugcuggauugucucguuuuccugccaaauaaacaggaucagcgcuuuacagaucuaaaaaaaaaaaaaaaaaaaaaaaaaaaaaaaaaaaaaaaaaaaaaaaaaaaaaaaaaaaaaaaaugcaucccccccccccccccccccccccccccccccaaaggcucuuuucagagccaccagaauu

SEQ ID NO: 20558 - RNA, 1562 nt, Artificial Sequence
  mRNA product Design i-2 comprising derived and/or modified sequence from HRSV(Memphis-37)__AIY60635.1__N (wt)
gggagaggcgcugccuacggagguggcagccaucuccuucucggcaucaagcuuaccauggcucuuagcaaagucaaguugaacgauacacucaacaaagaucaacuucugucauccagcaaauacaccauccaacggagcacaggagauaguauugauacuccuaauuaugaugugcagaaacacaucaacaaguuauguggcauguuauuaaucacagaagaugcuaaucauaaauucacugggguaauagguauguuauaugcuaugucuagauuaggaagagaagacaccauaaaaauacucagagaugcgggauaucauguaaaagcaaauggaguggauguaacaacacaucgucaagacauuaauggaaaagaaaugaaauuugaaguguuaacauuggcaagcuuaacaacugaaauucaaaucaacauugagauagaaucuaggaaauccuacaaaaaaaugcuaaaagaaaugggagagguggcuccagaauacaggcaugacucuccugauuguggaaugauaauauuauguauagcagcauuaguaauaaccaaauuagcagcaggggauagaucuggucuuacugcugugauuaggagagcuaauaauguucuaaaaaaugaaaugaaacguuauaaaggcuuacuaccaaaggauauagccaacagcuucuaugaaguguuugaaaaauauccucacuuuauagauguuuuuguucauuuugguauagcacaaucuucuaccagagguggcaguagaguugaagggauuuuugcaggauuguuuaugaaugccuauggugcagggcaagugauguuacgguggggagucuuagcaaaaucaguuaaaaauauuaugcuaggacaugcuagugugcaagcagaaauggaacaaguuguggaaguuuaugaauaugcccaaaaauuggguggagaagcaggauucuaccauauauugaacaauccaaaagcaucauuauuaucuuugacucaauuuccccacuucuccaguguaguauugggcaaugcugcuggccuaggcauaaugggagaauacagagguacaccaaggaaucaagaucuauaugaugcugcaaaggcauaugcugaacaacucaaagaaaauggugugauuaacuacaguguauuagacuugacagcagaagaacuagaggcuaucaaacaucagcuuaauccaaaagauaaugauguagagcuuugaggacuagugcaucacauuuaaaagcaucucagccuaccaugagaauaagagaaagaaaaugaagaucaauagcuuauucaucucuuuuucuuuuucguugguguaaagccaacacccugucuaaaaaacauaaauuucuuuaaucauuuugccucuuuucucugugcuucaauuaauaaaaaauggaaagaaccuagaucuaaaaaaaaaaaaaaaaaaaaaaaaaaaaaaaaaaaaaaaaaaaaaaaaaaaaaaaaaaaaaaaaugcaucccccccccccccccccccccccccccccccaaaggcucuuuucagagccaccagaauu

SEQ ID NO: 20559 - RNA, 1562 nt, Artificial Sequence
  mRNA product Design i-2 comprising derived and/or modified sequence from HRSV(Memphis-37)__AIY60635.1__N (opt1)
gggagaggcgcugccuacggagguggcagccaucuccuucucggcaucaagcuuaccauggcccugagcaaggugaagcucaacgacacccugaacaaggaccagcugcucuccagcuccaaguacaccauccagcgcagcaccggcgacuccaucgacacccccaacuacgacguccagaagcacaucaacaagcugugcgggaugcugcucaucaccgaggacgccaaccacaaguucaccggcgugaucgggaugcuguacgcgaugagccggcugggccgcgaggacacgaucaagauccuccgggacgccggguaccacgugaaggccaacggcgucgacgugaccacccaccgccaggacaucaacggcaaggagaugaaguucgaggugcugacccuggccucccucacgaccgagauccagaucaacaucgagaucgagagccggaaguccuacaagaagaugcugaaggagaugggggaggucgccccggaguaccgccacgacagccccgacugcggcaugaucauccugugcaucgcggcccucgugaucaccaagcuggccgccggggaccgguccggccugaccgcggugauccgccgggccaacaacguccucaagaacgagaugaagcgcuacaaggggcugcugcccaaggacaucgccaacagcuucuacgagguguucgagaaguacccccacuucaucgacguguucguccacuucggcaucgcccaguccagcacgcggggcgggucccgcguggagggcaucuucgccgggcuguucaugaacgcguacggcgccggccaggugaugcugcgguggggcguccuggccaagagcgugaagaacaucaugcucgggcacgccuccgugcaggccgagauggagcaggucguggagguguacgaguacgcgcagaagcucgggggcgaggccggguucuaccacauccugaacaacccgaaggccagccuccugucccugacccaguucccccacuucagcagcgucgugcucggcaacgccgccggccuggggaucaugggcgaguaccgcgggacgccccggaaccaggaccuguacgacgcggccaaggccuacgccgagcagcucaaggagaacggcgugaucaacuacuccguccuggaccugaccgccgaggagcucgaggcgaucaagcaccagcugaaccccaaggacaacgacguggagcugugaggacuagugcaucacauuuaaaagcaucucagccuaccaugagaauaagagaaagaaaaugaagaucaauagcuuauucaucucuuuuucuuuuucguugguguaaagccaacacccugucuaaaaaacauaaauuucuuuaaucauuuugccucuuuucucugugcuucaauuaauaaaaaauggaaagaaccuagaucuaaaaaaaaaaaaaaaaaaaaaaaaaaaaaaaaaaaaaaaaaaaaaaaaaaaaaaaaaaaaaaaaugcaucccccccccccccccccccccccccccccccaaaggcucuuuucagagccaccagaauu

SEQ ID NO: 20560 - RNA, 1562 nt, Artificial Sequence
  mRNA product Design i-2 comprising derived and/or modified sequence from HRSV(Memphis-37)__AIY60635.1__N (opt2)
gggagaggcgcugccuacggagguggcagccaucuccuucucggcaucaagcuuaccauggcccucuccaaggucaagcucaacgacacccucaacaaggaccagcuccucuccuccuccaaguacaccauccagcgcuccaccggcgacuccaucgacacccccaacuacgacguccagaagcacaucaacaagcucugcggcaugcuccucaucaccgaggacgccaaccacaaguucaccggcgucaucggcaugcucuacgccaugucccgccucggccgcgaggacaccaucaagauccuccgcgacgccggcuaccacgucaaggccaacggcgucgacgucaccacccaccgccaggacaucaacggcaaggagaugaaguucgagguccucacccucgccucccucaccaccgagauccagaucaacaucgagaucgagucccgcaaguccuacaagaagaugcucaaggagaugggcgaggucgcccccgaguaccgccacgacucccccgacugcggcaugaucauccucugcaucgccgcccucgucaucaccaagcucgccgccggcgaccgcuccggccucaccgccgucauccgccgcgccaacaacguccucaagaacgagaugaagcgcuacaagggccuccuccccaaggacaucgccaacuccuucuacgaggucuucgagaaguacccccacuucaucgacgucuucguccacuucggcaucgcccaguccuccacccgcggcggcucccgcgucgagggcaucuucgccggccucuucaugaacgccuacggcgccggccaggucaugcuccgcuggggcguccucgccaaguccgucaagaacaucaugcucggccacgccuccguccaggccgagauggagcaggucgucgaggucuacgaguacgcccagaagcucggcggcgaggccggcuucuaccacauccucaacaaccccaaggccucccuccucucccucacccaguucccccacuucuccuccgucguccucggcaacgccgccggccucggcaucaugggcgaguaccgcggcaccccccgcaaccaggaccucuacgacgccgccaaggccuacgccgagcagcucaaggagaacggcgucaucaacuacuccguccucgaccucaccgccgaggagcucgaggccaucaagcaccagcucaaccccaaggacaacgacgucgagcucugaggacuagugcaucacauuuaaaagcaucucagccuaccaugagaauaagagaaagaaaaugaagaucaauagcuuauucaucucuuuuucuuuuucguugguguaaagccaacacccugucuaaaaaacauaaauuucuuuaaucauuuugccucuuuucucugugcuucaauuaauaaaaaauggaaagaaccuagaucuaaaaaaaaaaaaaaaaaaaaaaaaaaaaaaaaaaaaaaaaaaaaaaaaaaaaaaaaaaaaaaaaugcaucccccccccccccccccccccccccccccccaaaggcucuuuucagagccaccagaauu

SEQ ID NO: 20561 - RNA, 1562 nt, Artificial Sequence
  mRNA product Design i-2 comprising derived and/or modified sequence from HRSV(Memphis-37)__AIY60635.1__N (opt3)
gggagaggcgcugccuacggagguggcagccaucuccuucucggcaucaagcuuaccauggcccugagcaaggugaaacucaacgacacccuuaauaaggaucagcuguuguccucuucaaaauacacaauccaaagaaguacuggcgacagcauugauacgcccaacuaugacguccagaagcacauaaauaaauuaugcgggaugcugcuaaucaccgaggaugcuaaccauaaguucacaggaguuauugguaugcucuacgcaauguccaggcugggccgggaagacacuaucaagauucuucgcgaugccggguaucacgugaaagcgaauggaguagacgugaccacacaucgacaggauaucaacggcaaggagaugaaauuugaaguccugaccuuggcuucucucacuacagagauacagaucaauauugaaaucgagucgcguaagucauacaaaaagaugcugaaggagaugggugaaguggccccugaguauagacacgacagcccagauugugggaugauuauccugugcauagcagcccucguuauuaccaaauuagcugcaggagacaggaguggccugacggccgugauccggcgcgcuaacaauguccuuaagaacgaaaugaaaagauacaagggcuugcugccgaaagauauugccaauuccuucuaugagguguuugagaaguacccccauuucaucgacguauuuguucacuucgggaucgcgcaaucuagcacuaggggagguucccggguggaaggcauuuuugcagggcuauucaugaacgccuacggagcuggccaggucaugcuccgcuggggugugcuggccaaaucagugaagaauauaaugcuugggcacgcaaguguccaggcugagauggaacagguuguggagguauaugaauacgcccaaaagcugggaggcgaggcgggcuuuuaucauaucuugaacaauccuaaagccagccuccugucuuuaacccaguucccacacuuuuccucagugguccuggggaacgcagcuggacucgguauuaugggcgaguaccgagggacacccagaaaccaggaccuuuaugaugccgcuaaggccuacgcagaacagcugaaagagaauggagugaucaacuauagcguuuuggaccuaacugccgaggaacuggaagcuauaaagcaucaacucaauccuaaagauaacgacguggagcugugaggacuagugcaucacauuuaaaagcaucucagccuaccaugagaauaagagaaagaaaaugaagaucaauagcuuauucaucucuuuuucuuuuucguugguguaaagccaacacccugucuaaaaaacauaaauuucuuuaaucauuuugccucuuuucucugugcuucaauuaauaaaaaauggaaagaaccuagaucuaaaaaaaaaaaaaaaaaaaaaaaaaaaaaaaaaaaaaaaaaaaaaaaaaaaaaaaaaaaaaaaaugcaucccccccccccccccccccccccccccccccaaaggcucuuuucagagccaccagaauu

SEQ ID NO: 20562 - RNA, 1562 nt, Artificial Sequence
  mRNA product Design i-2 comprising derived and/or modified sequence from HRSV(Memphis-37)__AIY60635.1__N (opt4)
gggagaggcgcugccuacggagguggcagccaucuccuucucggcaucaagcuuaccauggcccugagcaaggugaagcugaacgacacccugaacaaggaccagcugcugagcagcagcaaguacaccauccagagaagcaccggcgacagcaucgacacccccaacuacgacgugcagaagcacaucaacaagcugugcggcaugcugcugaucaccgaggacgccaaccacaaguucaccggcgugaucggcaugcuguacgccaugagcagacugggcagagaggacaccaucaagauccugagagacgccggcuaccacgugaaggccaacggcguggacgugaccacccacagacaggacaucaacggcaaggagaugaaguucgaggugcugacccuggccagccugaccaccgagauccagaucaacaucgagaucgagagcagaaagagcuacaagaagaugcugaaggagaugggcgagguggcccccgaguacagacacgacagccccgacugcggcaugaucauccugugcaucgccgcccuggugaucaccaagcuggccgccggcgacagaagcggccugaccgccgugaucagaagagccaacaacgugcugaagaacgagaugaagagauacaagggccugcugcccaaggacaucgccaacagcuucuacgagguguucgagaaguacccccacuucaucgacguguucgugcacuucggcaucgcccagagcagcaccagaggcggcagcagaguggagggcaucuucgccggccuguucaugaacgccuacggcgccggccaggugaugcugagauggggcgugcuggccaagagcgugaagaacaucaugcugggccacgccagcgugcaggccgagauggagcaggugguggagguguacgaguacgcccagaagcugggcggcgaggccggcuucuaccacauccugaacaaccccaaggccagccugcugagccugacccaguucccccacuucagcagcguggugcugggcaacgccgccggccugggcaucaugggcgaguacagaggcacccccagaaaccaggaccuguacgacgccgccaaggccuacgccgagcagcugaaggagaacggcgugaucaacuacagcgugcuggaccugaccgccgaggagcuggaggccaucaagcaccagcugaaccccaaggacaacgacguggagcugugaggacuagugcaucacauuuaaaagcaucucagccuaccaugagaauaagagaaagaaaaugaagaucaauagcuuauucaucucuuuuucuuuuucguugguguaaagccaacacccugucuaaaaaacauaaauuucuuuaaucauuuugccucuuuucucugugcuucaauuaauaaaaaauggaaagaaccuagaucuaaaaaaaaaaaaaaaaaaaaaaaaaaaaaaaaaaaaaaaaaaaaaaaaaaaaaaaaaaaaaaaaugcaucccccccccccccccccccccccccccccccaaaggcucuuuucagagccaccagaauu

SEQ ID NO: 20563 - RNA, 1562 nt, Artificial Sequence
  mRNA product Design i-2 comprising derived and/or modified sequence from HRSV(Memphis-37)__AIY60635.1__N (opt5)
gggagaggcgcugccuacggagguggcagccaucuccuucucggcaucaagcuuaccauggcccugagcaaggugaaacucaacgacacccugaauaaggaucagcuucuguccucuagcaaauacacaauccaaagauccacgggcgacucuauugauacccccaacuaugacguccagaagcacaucaauaaacucugcgggaugcugcuuauuacagaggaugcuaaccauaaguucaccggaguuaucggcaugcuguacgccaugagccggcucgggcgcgaagacacaauuaagauccugagagaugcgggauaucacgugaaagcuaauggcguggacgucaccacacaucggcaggauaucaacgggaaggagaugaaauuugaagugcugacccucgccucccugacgaccgagauucagaucaauauugaaaucgagucucgcaagagcuacaaaaagaugcuuaaggagaugggagaaguugccccugaguauagacacgacuccccggauuguggcaugauuauccugugcauugcugcccucgugaucacaaaacuggcugccggcgaccggagcgggcuuaccgcggucauccgcagagccaacaaugugcugaagaacgaaaugaaacgguacaagggacuccugcccaaagauauugcuaauucuuucuaugagguuuuugagaaguacccucauuucaucgacguguuuguccacuucggcauugcccaauccagcacacgcgggggaucuagaguggaaggcaucuuugcugggcuguucaugaacgccuacggagcgggccaggugaugcuccgguggggcguccuggccaaauccguuaagaauauuaugcuugggcacgcuagcgugcaggccgagauggaacagguggucgagguguaugaauacgcucaaaagcugggaggcgaggccggguuuuaucauauccucaacaaucccaaagccucucugcuuucccugacccaguucccucacuuuagcuccguugugcucggaaacgcugcgggccuggggaucaugggagaguaccgcggcacgcccagaaaccaggaccuguaugaugccgcuaaggccuacgccgaacagcucaaagagaauggcgucauuaacuauucugugcuggaccuuacagcugaggaacuggaagccaucaagcaucaacucaauccuaaagauaacgacguugagcugugaggacuagugcaucacauuuaaaagcaucucagccuaccaugagaauaagagaaagaaaaugaagaucaauagcuuauucaucucuuuuucuuuuucguugguguaaagccaacacccugucuaaaaaacauaaauuucuuuaaucauuuugccucuuuucucugugcuucaauuaauaaaaaauggaaagaaccuagaucuaaaaaaaaaaaaaaaaaaaaaaaaaaaaaaaaaaaaaaaaaaaaaaaaaaaaaaaaaaaaaaaaugcaucccccccccccccccccccccccccccccccaaaggcucuuuucagagccaccagaauu

SEQ ID NO: 20564 - RNA, 1562 nt, Artificial Sequence
  mRNA product Design i-2 comprising derived and/or modified sequence from HRSV(Memphis-37)__AIY60635.1__N (opt6)
gggagaggcgcugccuacggagguggcagccaucuccuucucggcaucaagcuuaccauggccuuaaguaaaguaaaauuaaacgacacacuaaacaaagaccaauuacucucaucaucgaaauauacaauacaaagauccacaggagacuccauagauacaccaaauuacgacguacaaaaacauauaaacaaacucugcggaauguuauuaauaacagaagacgcaaaccacaaauucacaggagucauagguaugcuauacgcaaugucaagauuaggaagagaagauacaauaaaaauacuaagagacgcaggauaccacguaaaagcaaacggaguagacguaacaacacauagacaagauauaaacgguaaagaaaugaaauucgaaguacuaacacuagccagucuaacaacagaaauacaaauaaacauagaaauagaaagccgaaaaucauacaaaaaaauguuaaaagaaaugggggaaguagcacccgaauacagacaugauucaccugacugcggaaugauaauacucugcauagcggcauuagucauaacaaaacuagccgcaggagacagaagcggauuaacagcaguaauaagaagagcaaauaauguauuaaaaaaugaaaugaaaagguauaaaggauuacuaccaaaagauauagcaaacucauucuaugaaguuuucgaaaaauacccacacuucauagacgucuucguacacuuuggaauagcacaaagcagcacaagaggaggaagcagaguagaaggaauauucgcaggacuauucaugaaugcauacggagccggacaaguaaugcuaagauggggaguuuuagcaaaaagcguaaaaaacauaauguuaggacacgccuccguccaagccgaaauggaacaaguaguagaaguauacgaauaugcacaaaaacuaggaggagaagcaggauucuaucacauacucaauaacccaaaagcaucacuauugagcuuaacacaauucccacauuuuucauccguaguccuaggaaaugcagcaggcuuaggaauaaugggagaauacagaggcacaccaagaaaucaagacuuauacgaugcagcaaaagcauacgcagaacaacuaaaagaaaacggaguaauaaacuacucaguauuagauuuaacagcagaagaauuagaagcaauaaaacaucaacuaaauccuaaggauaaugauguagaacucuaaggacuagugcaucacauuuaaaagcaucucagccuaccaugagaauaagagaaagaaaaugaagaucaauagcuuauucaucucuuuuucuuuuucguugguguaaagccaacacccugucuaaaaaacauaaauuucuuuaaucauuuugccucuuuucucugugcuucaauuaauaaaaaauggaaagaaccuagaucuaaaaaaaaaaaaaaaaaaaaaaaaaaaaaaaaaaaaaaaaaaaaaaaaaaaaaaaaaaaaaaaaugcaucccccccccccccccccccccccccccccccaaaggcucuuuucagagccaccagaauu

SEQ ID NO: 20565 - RNA, 1562 nt, Artificial Sequence
  mRNA product Design i-2 comprising derived and/or modified sequence from HRSV(Memphis-37)__AIY60635.1__N (opt11)
gggagaggcgcugccuacggagguggcagccaucuccuucucggcaucaagcuuaccauggcccuaagcaaagucaaacucaacgacacacuaaacaaagaccaacuccucagcuccagcaaauacaccauccaacgauccaccggcgacuccauagacacccccaacuacgacguccaaaaacacaucaacaaacuaugcggcaugcuccuaaucacagaagacgccaaccacaaauucaccggagucaucggcaugcucuacgccaugagccgccucggccgagaagacacaaucaaaauacuaagagacgccggcuaccacguaaaagccaacggcguagacguaaccacccaccgccaagacaucaacggcaaagaaaugaaauucgaaguucucacccucgccucacuaaccacggaaauccaaauaaacauugaaaucgaaagcagaaaauccuacaaaaagaugcuaaaagaaaugggcgagguagccccagaauaccgccacgacagccccgacugcggaaugaucauccucugcauugcagcccucgucaucaccaaacuagccgccggcgacagaagcggccuaaccgcaguaauccgccgagccaacaacguacucaaaaacgaaaugaaacgcuacaaaggccuccuccccaaagacaucgccaacagcuucuacgaaguauucgaaaaauacccgcacuucaucgacgucuucguacacuucggcauagcccaaagcagcacacgaggcggcucccgcgucgaaggaauauucgccggccuguucaugaacgcauacggagcgggccaagucaugcuccgcugggguguacuagccaaguccgucaaaaacaucaugcuagggcacgcaagcguacaagccgaaauggaacaaguagucgaagucuacgaauacgcacaaaaacuaggcggcgaagccggcuucuaccacauccuaaacaaccccaaagccucauuacucucccucacccaauuuccucacuucuccagcgucguccucggaaacgccgccggccuaggcauaaugggggaauaccgcggcaccccgcgcaaccaagaccucuacgacgcagcaaaagccuacgcagaacaacuaaaagaaaacggagucaucaacuacagcguacuggaccuaaccgccgaagaacucgaagccauaaaacaccaacucaaccccaaagacaacgacgucgagcucuaaggacuagugcaucacauuuaaaagcaucucagccuaccaugagaauaagagaaagaaaaugaagaucaauagcuuauucaucucuuuuucuuuuucguugguguaaagccaacacccugucuaaaaaacauaaauuucuuuaaucauuuugccucuuuucucugugcuucaauuaauaaaaaauggaaagaaccuagaucuaaaaaaaaaaaaaaaaaaaaaaaaaaaaaaaaaaaaaaaaaaaaaaaaaaaaaaaaaaaaaaaaugcaucccccccccccccccccccccccccccccccaaaggcucuuuucagagccaccagaauu

SEQ ID NO: 20566 - RNA, 1558 nt, Artificial Sequence
  mRNA product Design i-2 comprising derived and/or modified sequence from HRSV(Memphis-37)__AIY60635.1__N (wt)
ggggcgcugccuacggagguggcagccaucuccuucucggcaucaagcuuaccauggcucuuagcaaagucaaguugaacgauacacucaacaaagaucaacuucugucauccagcaaauacaccauccaacggagcacaggagauaguauugauacuccuaauuaugaugugcagaaacacaucaacaaguuauguggcauguuauuaaucacagaagaugcuaaucauaaauucacugggguaauagguauguuauaugcuaugucuagauuaggaagagaagacaccauaaaaauacucagagaugcgggauaucauguaaaagcaaauggaguggauguaacaacacaucgucaagacauuaauggaaaagaaaugaaauuugaaguguuaacauuggcaagcuuaacaacugaaauucaaaucaacauugagauagaaucuaggaaauccuacaaaaaaaugcuaaaagaaaugggagagguggcuccagaauacaggcaugacucuccugauuguggaaugauaauauuauguauagcagcauuaguaauaaccaaauuagcagcaggggauagaucuggucuuacugcugugauuaggagagcuaauaauguucuaaaaaaugaaaugaaacguuauaaaggcuuacuaccaaaggauauagccaacagcuucuaugaaguguuugaaaaauauccucacuuuauagauguuuuuguucauuuugguauagcacaaucuucuaccagagguggcaguagaguugaagggauuuuugcaggauuguuuaugaaugccuauggugcagggcaagugauguuacgguggggagucuuagcaaaaucaguuaaaaauauuaugcuaggacaugcuagugugcaagcagaaauggaacaaguuguggaaguuuaugaauaugcccaaaaauuggguggagaagcaggauucuaccauauauugaacaauccaaaagcaucauuauuaucuuugacucaauuuccccacuucuccaguguaguauugggcaaugcugcuggccuaggcauaaugggagaauacagagguacaccaaggaaucaagaucuauaugaugcugcaaaggcauaugcugaacaacucaaagaaaauggugugauuaacuacaguguauuagacuugacagcagaagaacuagaggcuaucaaacaucagcuuaauccaaaagauaaugauguagagcuuugaggacuagugcaucacauuuaaaagcaucucagccuaccaugagaauaagagaaagaaaaugaagaucaauagcuuauucaucucuuuuucuuuuucguugguguaaagccaacacccugucuaaaaaacauaaauuucuuuaaucauuuugccucuuuucucugugcuucaauuaauaaaaaauggaaagaaccuagaucuaaaaaaaaaaaaaaaaaaaaaaaaaaaaaaaaaaaaaaaaaaaaaaaaaaaaaaaaaaaaaaaaugcaucccccccccccccccccccccccccccccccaaaggcucuuuucagagccaccagaauu

SEQ ID NO: 20567 - RNA, 1558 nt, Artificial Sequence
  mRNA product Design i-2 comprising derived and/or modified sequence from HRSV(Memphis-37)__AIY60635.1__N (opt1)
ggggcgcugccuacggagguggcagccaucuccuucucggcaucaagcuuaccauggcccugagcaaggugaagcucaacgacacccugaacaaggaccagcugcucuccagcuccaaguacaccauccagcgcagcaccggcgacuccaucgacacccccaacuacgacguccagaagcacaucaacaagcugugcgggaugcugcucaucaccgaggacgccaaccacaaguucaccggcgugaucgggaugcuguacgcgaugagccggcugggccgcgaggacacgaucaagauccuccgggacgccggguaccacgugaaggccaacggcgucgacgugaccacccaccgccaggacaucaacggcaaggagaugaaguucgaggugcugacccuggccucccucacgaccgagauccagaucaacaucgagaucgagagccggaaguccuacaagaagaugcugaaggagaugggggaggucgccccggaguaccgccacgacagccccgacugcggcaugaucauccugugcaucgcggcccucgugaucaccaagcuggccgccggggaccgguccggccugaccgcggugauccgccgggccaacaacguccucaagaacgagaugaagcgcuacaaggggcugcugcccaaggacaucgccaacagcuucuacgagguguucgagaaguacccccacuucaucgacguguucguccacuucggcaucgcccaguccagcacgcggggcgggucccgcguggagggcaucuucgccgggcuguucaugaacgcguacggcgccggccaggugaugcugcgguggggcguccuggccaagagcgugaagaacaucaugcucgggcacgccuccgugcaggccgagauggagcaggucguggagguguacgaguacgcgcagaagcucgggggcgaggccggguucuaccacauccugaacaacccgaaggccagccuccugucccugacccaguucccccacuucagcagcgucgugcucggcaacgccgccggccuggggaucaugggcgaguaccgcgggacgccccggaaccaggaccuguacgacgcggccaaggccuacgccgagcagcucaaggagaacggcgugaucaacuacuccguccuggaccugaccgccgaggagcucgaggcgaucaagcaccagcugaaccccaaggacaacgacguggagcugugaggacuagugcaucacauuuaaaagcaucucagccuaccaugagaauaagagaaagaaaaugaagaucaauagcuuauucaucucuuuuucuuuuucguugguguaaagccaacacccugucuaaaaaacauaaauuucuuuaaucauuuugccucuuuucucugugcuucaauuaauaaaaaauggaaagaaccuagaucuaaaaaaaaaaaaaaaaaaaaaaaaaaaaaaaaaaaaaaaaaaaaaaaaaaaaaaaaaaaaaaaaugcaucccccccccccccccccccccccccccccccaaaggcucuuuucagagccaccagaauu

SEQ ID NO: 20568 - RNA, 1558 nt, Artificial Sequence
  mRNA product Design i-2 comprising derived and/or modified sequence from HRSV(Memphis-37)__AIY60635.1__N (opt2)
ggggcgcugccuacggagguggcagccaucuccuucucggcaucaagcuuaccauggcccucuccaaggucaagcucaacgacacccucaacaaggaccagcuccucuccuccuccaaguacaccauccagcgcuccaccggcgacuccaucgacacccccaacuacgacguccagaagcacaucaacaagcucugcggcaugcuccucaucaccgaggacgccaaccacaaguucaccggcgucaucggcaugcucuacgccaugucccgccucggccgcgaggacaccaucaagauccuccgcgacgccggcuaccacgucaaggccaacggcgucgacgucaccacccaccgccaggacaucaacggcaaggagaugaaguucgagguccucacccucgccucccucaccaccgagauccagaucaacaucgagaucgagucccgcaaguccuacaagaagaugcucaaggagaugggcgaggucgcccccgaguaccgccacgacucccccgacugcggcaugaucauccucugcaucgccgcccucgucaucaccaagcucgccgccggcgaccgcuccggccucaccgccgucauccgccgcgccaacaacguccucaagaacgagaugaagcgcuacaagggccuccuccccaaggacaucgccaacuccuucuacgaggucuucgagaaguacccccacuucaucgacgucuucguccacuucggcaucgcccaguccuccacccgcggcggcucccgcgucgagggcaucuucgccggccucuucaugaacgccuacggcgccggccaggucaugcuccgcuggggcguccucgccaaguccgucaagaacaucaugcucggccacgccuccguccaggccgagauggagcaggucgucgaggucuacgaguacgcccagaagcucggcggcgaggccggcuucuaccacauccucaacaaccccaaggccucccuccucucccucacccaguucccccacuucuccuccgucguccucggcaacgccgccggccucggcaucaugggcgaguaccgcggcaccccccgcaaccaggaccucuacgacgccgccaaggccuacgccgagcagcucaaggagaacggcgucaucaacuacuccguccucgaccucaccgccgaggagcucgaggccaucaagcaccagcucaaccccaaggacaacgacgucgagcucugaggacuagugcaucacauuuaaaagcaucucagccuaccaugagaauaagagaaagaaaaugaagaucaauagcuuauucaucucuuuuucuuuuucguugguguaaagccaacacccugucuaaaaaacauaaauuucuuuaaucauuuugccucuuuucucugugcuucaauuaauaaaaaauggaaagaaccuagaucuaaaaaaaaaaaaaaaaaaaaaaaaaaaaaaaaaaaaaaaaaaaaaaaaaaaaaaaaaaaaaaaaugcaucccccccccccccccccccccccccccccccaaaggcucuuuucagagccaccagaauu

SEQ ID NO: 20569 - RNA, 1558 nt, Artificial Sequence
  mRNA product Design i-2 comprising derived and/or modified sequence from HRSV(Memphis-37)__AIY60635.1__N (opt3)
ggggcgcugccuacggagguggcagccaucuccuucucggcaucaagcuuaccauggcccugagcaaggugaaacucaacgacacccuuaauaaggaucagcuguuguccucuucaaaauacacaauccaaagaaguacuggcgacagcauugauacgcccaacuaugacguccagaagcacauaaauaaauuaugcgggaugcugcuaaucaccgaggaugcuaaccauaaguucacaggaguuauugguaugcucuacgcaauguccaggcugggccgggaagacacuaucaagauucuucgcgaugccggguaucacgugaaagcgaauggaguagacgugaccacacaucgacaggauaucaacggcaaggagaugaaauuugaaguccugaccuuggcuucucucacuacagagauacagaucaauauugaaaucgagucgcguaagucauacaaaaagaugcugaaggagaugggugaaguggccccugaguauagacacgacagcccagauugugggaugauuauccugugcauagcagcccucguuauuaccaaauuagcugcaggagacaggaguggccugacggccgugauccggcgcgcuaacaauguccuuaagaacgaaaugaaaagauacaagggcuugcugccgaaagauauugccaauuccuucuaugagguguuugagaaguacccccauuucaucgacguauuuguucacuucgggaucgcgcaaucuagcacuaggggagguucccggguggaaggcauuuuugcagggcuauucaugaacgccuacggagcuggccaggucaugcuccgcuggggugugcuggccaaaucagugaagaauauaaugcuugggcacgcaaguguccaggcugagauggaacagguuguggagguauaugaauacgcccaaaagcugggaggcgaggcgggcuuuuaucauaucuugaacaauccuaaagccagccuccugucuuuaacccaguucccacacuuuuccucagugguccuggggaacgcagcuggacucgguauuaugggcgaguaccgagggacacccagaaaccaggaccuuuaugaugccgcuaaggccuacgcagaacagcugaaagagaauggagugaucaacuauagcguuuuggaccuaacugccgaggaacuggaagcuauaaagcaucaacucaauccuaaagauaacgacguggagcugugaggacuagugcaucacauuuaaaagcaucucagccuaccaugagaauaagagaaagaaaaugaagaucaauagcuuauucaucucuuuuucuuuuucguugguguaaagccaacacccugucuaaaaaacauaaauuucuuuaaucauuuugccucuuuucucugugcuucaauuaauaaaaaauggaaagaaccuagaucuaaaaaaaaaaaaaaaaaaaaaaaaaaaaaaaaaaaaaaaaaaaaaaaaaaaaaaaaaaaaaaaaugcaucccccccccccccccccccccccccccccccaaaggcucuuuucagagccaccagaauu

SEQ ID NO: 20570 - RNA, 1558 nt, Artificial Sequence
  mRNA product Design i-2 comprising derived and/or modified sequence from HRSV(Memphis-37)__AIY60635.1__N (opt4)
ggggcgcugccuacggagguggcagccaucuccuucucggcaucaagcuuaccauggcccugagcaaggugaagcugaacgacacccugaacaaggaccagcugcugagcagcagcaaguacaccauccagagaagcaccggcgacagcaucgacacccccaacuacgacgugcagaagcacaucaacaagcugugcggcaugcugcugaucaccgaggacgccaaccacaaguucaccggcgugaucggcaugcuguacgccaugagcagacugggcagagaggacaccaucaagauccugagagacgccggcuaccacgugaaggccaacggcguggacgugaccacccacagacaggacaucaacggcaaggagaugaaguucgaggugcugacccuggccagccugaccaccgagauccagaucaacaucgagaucgagagcagaaagagcuacaagaagaugcugaaggagaugggcgagguggcccccgaguacagacacgacagccccgacugcggcaugaucauccugugcaucgccgcccuggugaucaccaagcuggccgccggcgacagaagcggccugaccgccgugaucagaagagccaacaacgugcugaagaacgagaugaagagauacaagggccugcugcccaaggacaucgccaacagcuucuacgagguguucgagaaguacccccacuucaucgacguguucgugcacuucggcaucgcccagagcagcaccagaggcggcagcagaguggagggcaucuucgccggccuguucaugaacgccuacggcgccggccaggugaugcugagauggggcgugcuggccaagagcgugaagaacaucaugcugggccacgccagcgugcaggccgagauggagcaggugguggagguguacgaguacgcccagaagcugggcggcgaggccggcuucuaccacauccugaacaaccccaaggccagccugcugagccugacccaguucccccacuucagcagcguggugcugggcaacgccgccggccugggcaucaugggcgaguacagaggcacccccagaaaccaggaccuguacgacgccgccaaggccuacgccgagcagcugaaggagaacggcgugaucaacuacagcgugcuggaccugaccgccgaggagcuggaggccaucaagcaccagcugaaccccaaggacaacgacguggagcugugaggacuagugcaucacauuuaaaagcaucucagccuaccaugagaauaagagaaagaaaaugaagaucaauagcuuauucaucucuuuuucuuuuucguugguguaaagccaacacccugucuaaaaaacauaaauuucuuuaaucauuuugccucuuuucucugugcuucaauuaauaaaaaauggaaagaaccuagaucuaaaaaaaaaaaaaaaaaaaaaaaaaaaaaaaaaaaaaaaaaaaaaaaaaaaaaaaaaaaaaaaaugcaucccccccccccccccccccccccccccccccaaaggcucuuuucagagccaccagaauu

SEQ ID NO: 20571 - RNA, 1558 nt, Artificial Sequence
  mRNA product Design i-2 comprising derived and/or modified sequence from HRSV(Memphis-37)__AIY60635.1__N (opt5)
ggggcgcugccuacggagguggcagccaucuccuucucggcaucaagcuuaccauggcccugagcaaggugaaacucaacgacacccugaauaaggaucagcuucuguccucuagcaaauacacaauccaaagauccacgggcgacucuauugauacccccaacuaugacguccagaagcacaucaauaaacucugcgggaugcugcuuauuacagaggaugcuaaccauaaguucaccggaguuaucggcaugcuguacgccaugagccggcucgggcgcgaagacacaauuaagauccugagagaugcgggauaucacgugaaagcuaauggcguggacgucaccacacaucggcaggauaucaacgggaaggagaugaaauuugaagugcugacccucgccucccugacgaccgagauucagaucaauauugaaaucgagucucgcaagagcuacaaaaagaugcuuaaggagaugggagaaguugccccugaguauagacacgacuccccggauuguggcaugauuauccugugcauugcugcccucgugaucacaaaacuggcugccggcgaccggagcgggcuuaccgcggucauccgcagagccaacaaugugcugaagaacgaaaugaaacgguacaagggacuccugcccaaagauauugcuaauucuuucuaugagguuuuugagaaguacccucauuucaucgacguguuuguccacuucggcauugcccaauccagcacacgcgggggaucuagaguggaaggcaucuuugcugggcuguucaugaacgccuacggagcgggccaggugaugcuccgguggggcguccuggccaaauccguuaagaauauuaugcuugggcacgcuagcgugcaggccgagauggaacagguggucgagguguaugaauacgcucaaaagcugggaggcgaggccggguuuuaucauauccucaacaaucccaaagccucucugcuuucccugacccaguucccucacuuuagcuccguugugcucggaaacgcugcgggccuggggaucaugggagaguaccgcggcacgcccagaaaccaggaccuguaugaugccgcuaaggccuacgccgaacagcucaaagagaauggcgucauuaacuauucugugcuggaccuuacagcugaggaacuggaagccaucaagcaucaacucaauccuaaagauaacgacguugagcugugaggacuagugcaucacauuuaaaagcaucucagccuaccaugagaauaagagaaagaaaaugaagaucaauagcuuauucaucucuuuuucuuuuucguugguguaaagccaacacccugucuaaaaaacauaaauuucuuuaaucauuuugccucuuuucucugugcuucaauuaauaaaaaauggaaagaaccuagaucuaaaaaaaaaaaaaaaaaaaaaaaaaaaaaaaaaaaaaaaaaaaaaaaaaaaaaaaaaaaaaaaaugcaucccccccccccccccccccccccccccccccaaaggcucuuuucagagccaccagaauu

SEQ ID NO: 20572 - RNA, 1558 nt, Artificial Sequence
  mRNA product Design i-2 comprising derived and/or modified sequence from HRSV(Memphis-37)__AIY60635.1__N (opt6)
ggggcgcugccuacggagguggcagccaucuccuucucggcaucaagcuuaccauggccuuaaguaaaguaaaauuaaacgacacacuaaacaaagaccaauuacucucaucaucgaaauauacaauacaaagauccacaggagacuccauagauacaccaaauuacgacguacaaaaacauauaaacaaacucugcggaauguuauuaauaacagaagacgcaaaccacaaauucacaggagucauagguaugcuauacgcaaugucaagauuaggaagagaagauacaauaaaaauacuaagagacgcaggauaccacguaaaagcaaacggaguagacguaacaacacauagacaagauauaaacgguaaagaaaugaaauucgaaguacuaacacuagccagucuaacaacagaaauacaaauaaacauagaaauagaaagccgaaaaucauacaaaaaaauguuaaaagaaaugggggaaguagcacccgaauacagacaugauucaccugacugcggaaugauaauacucugcauagcggcauuagucauaacaaaacuagccgcaggagacagaagcggauuaacagcaguaauaagaagagcaaauaauguauuaaaaaaugaaaugaaaagguauaaaggauuacuaccaaaagauauagcaaacucauucuaugaaguuuucgaaaaauacccacacuucauagacgucuucguacacuuuggaauagcacaaagcagcacaagaggaggaagcagaguagaaggaauauucgcaggacuauucaugaaugcauacggagccggacaaguaaugcuaagauggggaguuuuagcaaaaagcguaaaaaacauaauguuaggacacgccuccguccaagccgaaauggaacaaguaguagaaguauacgaauaugcacaaaaacuaggaggagaagcaggauucuaucacauacucaauaacccaaaagcaucacuauugagcuuaacacaauucccacauuuuucauccguaguccuaggaaaugcagcaggcuuaggaauaaugggagaauacagaggcacaccaagaaaucaagacuuauacgaugcagcaaaagcauacgcagaacaacuaaaagaaaacggaguaauaaacuacucaguauuagauuuaacagcagaagaauuagaagcaauaaaacaucaacuaaauccuaaggauaaugauguagaacucuaaggacuagugcaucacauuuaaaagcaucucagccuaccaugagaauaagagaaagaaaaugaagaucaauagcuuauucaucucuuuuucuuuuucguugguguaaagccaacacccugucuaaaaaacauaaauuucuuuaaucauuuugccucuuuucucugugcuucaauuaauaaaaaauggaaagaaccuagaucuaaaaaaaaaaaaaaaaaaaaaaaaaaaaaaaaaaaaaaaaaaaaaaaaaaaaaaaaaaaaaaaaugcaucccccccccccccccccccccccccccccccaaaggcucuuuucagagccaccagaauu

SEQ ID NO: 20573 - RNA, 1558 nt, Artificial Sequence
  mRNA product Design i-2 comprising derived and/or modified sequence from HRSV(Memphis-37)__AIY60635.1__N (opt11)
ggggcgcugccuacggagguggcagccaucuccuucucggcaucaagcuuaccauggcccuaagcaaagucaaacucaacgacacacuaaacaaagaccaacuccucagcuccagcaaauacaccauccaacgauccaccggcgacuccauagacacccccaacuacgacguccaaaaacacaucaacaaacuaugcggcaugcuccuaaucacagaagacgccaaccacaaauucaccggagucaucggcaugcucuacgccaugagccgccucggccgagaagacacaaucaaaauacuaagagacgccggcuaccacguaaaagccaacggcguagacguaaccacccaccgccaagacaucaacggcaaagaaaugaaauucgaaguucucacccucgccucacuaaccacggaaauccaaauaaacauugaaaucgaaagcagaaaauccuacaaaaagaugcuaaaagaaaugggcgagguagccccagaauaccgccacgacagccccgacugcggaaugaucauccucugcauugcagcccucgucaucaccaaacuagccgccggcgacagaagcggccuaaccgcaguaauccgccgagccaacaacguacucaaaaacgaaaugaaacgcuacaaaggccuccuccccaaagacaucgccaacagcuucuacgaaguauucgaaaaauacccgcacuucaucgacgucuucguacacuucggcauagcccaaagcagcacacgaggcggcucccgcgucgaaggaauauucgccggccuguucaugaacgcauacggagcgggccaagucaugcuccgcugggguguacuagccaaguccgucaaaaacaucaugcuagggcacgcaagcguacaagccgaaauggaacaaguagucgaagucuacgaauacgcacaaaaacuaggcggcgaagccggcuucuaccacauccuaaacaaccccaaagccucauuacucucccucacccaauuuccucacuucuccagcgucguccucggaaacgccgccggccuaggcauaaugggggaauaccgcggcaccccgcgcaaccaagaccucuacgacgcagcaaaagccuacgcagaacaacuaaaagaaaacggagucaucaacuacagcguacuggaccuaaccgccgaagaacucgaagccauaaaacaccaacucaaccccaaagacaacgacgucgagcucuaaggacuagugcaucacauuuaaaagcaucucagccuaccaugagaauaagagaaagaaaaugaagaucaauagcuuauucaucucuuuuucuuuuucguugguguaaagccaacacccugucuaaaaaacauaaauuucuuuaaucauuuugccucuuuucucugugcuucaauuaauaaaaaauggaaagaaccuagaucuaaaaaaaaaaaaaaaaaaaaaaaaaaaaaaaaaaaaaaaaaaaaaaaaaaaaaaaaaaaaaaaaugcaucccccccccccccccccccccccccccccccaaaggcucuuuucagagccaccagaauu

SEQ ID NO: 20574 - RNA, 1393 nt, Artificial Sequence
  mRNA product Design i-3 comprising derived and/or modified sequence from HRSV(Memphis-37)__AIY60635.1__N (wt)
gggagaaagcuuaccauggcucuuagcaaagucaaguugaacgauacacucaacaaagaucaacuucugucauccagcaaauacaccauccaacggagcacaggagauaguauugauacuccuaauuaugaugugcagaaacacaucaacaaguuauguggcauguuauuaaucacagaagaugcuaaucauaaauucacugggguaauagguauguuauaugcuaugucuagauuaggaagagaagacaccauaaaaauacucagagaugcgggauaucauguaaaagcaaauggaguggauguaacaacacaucgucaagacauuaauggaaaagaaaugaaauuugaaguguuaacauuggcaagcuuaacaacugaaauucaaaucaacauugagauagaaucuaggaaauccuacaaaaaaaugcuaaaagaaaugggagagguggcuccagaauacaggcaugacucuccugauuguggaaugauaauauuauguauagcagcauuaguaauaaccaaauuagcagcaggggauagaucuggucuuacugcugugauuaggagagcuaauaauguucuaaaaaaugaaaugaaacguuauaaaggcuuacuaccaaaggauauagccaacagcuucuaugaaguguuugaaaaauauccucacuuuauagauguuuuuguucauuuugguauagcacaaucuucuaccagagguggcaguagaguugaagggauuuuugcaggauuguuuaugaaugccuauggugcagggcaagugauguuacgguggggagucuuagcaaaaucaguuaaaaauauuaugcuaggacaugcuagugugcaagcagaaauggaacaaguuguggaaguuuaugaauaugcccaaaaauuggguggagaagcaggauucuaccauauauugaacaauccaaaagcaucauuauuaucuuugacucaauuuccccacuucuccaguguaguauugggcaaugcugcuggccuaggcauaaugggagaauacagagguacaccaaggaaucaagaucuauaugaugcugcaaaggcauaugcugaacaacucaaagaaaauggugugauuaacuacaguguauuagacuugacagcagaagaacuagaggcuaucaaacaucagcuuaauccaaaagauaaugauguagagcuuugaggacuaguuauaagacugacuagcccgaugggccucccaacgggcccuccuccccuccuugcaccgagauuaauaaaaaaaaaaaaaaaaaaaaaaaaaaaaaaaaaaaaaaaaaaaaaaaaaaaaaaaaaaaaaaaaugcaucccccccccccccccccccccccccccccccaaaggcucuuuucagagccaccagaauu

SEQ ID NO: 20575 - RNA, 1393 nt, Artificial Sequence
  mRNA product Design i-3 comprising derived and/or modified sequence from HRSV(Memphis-37)__AIY60635.1__N (opt1)
gggagaaagcuuaccauggcccugagcaaggugaagcucaacgacacccugaacaaggaccagcugcucuccagcuccaaguacaccauccagcgcagcaccggcgacuccaucgacacccccaacuacgacguccagaagcacaucaacaagcugugcgggaugcugcucaucaccgaggacgccaaccacaaguucaccggcgugaucgggaugcuguacgcgaugagccggcugggccgcgaggacacgaucaagauccuccgggacgccggguaccacgugaaggccaacggcgucgacgugaccacccaccgccaggacaucaacggcaaggagaugaaguucgaggugcugacccuggccucccucacgaccgagauccagaucaacaucgagaucgagagccggaaguccuacaagaagaugcugaaggagaugggggaggucgccccggaguaccgccacgacagccccgacugcggcaugaucauccugugcaucgcggcccucgugaucaccaagcuggccgccggggaccgguccggccugaccgcggugauccgccgggccaacaacguccucaagaacgagaugaagcgcuacaaggggcugcugcccaaggacaucgccaacagcuucuacgagguguucgagaaguacccccacuucaucgacguguucguccacuucggcaucgcccaguccagcacgcggggcgggucccgcguggagggcaucuucgccgggcuguucaugaacgcguacggcgccggccaggugaugcugcgguggggcguccuggccaagagcgugaagaacaucaugcucgggcacgccuccgugcaggccgagauggagcaggucguggagguguacgaguacgcgcagaagcucgggggcgaggccggguucuaccacauccugaacaacccgaaggccagccuccugucccugacccaguucccccacuucagcagcgucgugcucggcaacgccgccggccuggggaucaugggcgaguaccgcgggacgccccggaaccaggaccuguacgacgcggccaaggccuacgccgagcagcucaaggagaacggcgugaucaacuacuccguccuggaccugaccgccgaggagcucgaggcgaucaagcaccagcugaaccccaaggacaacgacguggagcugugaggacuaguuauaagacugacuagcccgaugggccucccaacgggcccuccuccccuccuugcaccgagauuaauaaaaaaaaaaaaaaaaaaaaaaaaaaaaaaaaaaaaaaaaaaaaaaaaaaaaaaaaaaaaaaaaugcaucccccccccccccccccccccccccccccccaaaggcucuuuucagagccaccagaauu

SEQ ID NO: 20576 - RNA, 1393 nt, Artificial Sequence
  mRNA product Design i-3 comprising derived and/or modified sequence from HRSV(Memphis-37)__AIY60635.1__N (opt2)
gggagaaagcuuaccauggcccucuccaaggucaagcucaacgacacccucaacaaggaccagcuccucuccuccuccaaguacaccauccagcgcuccaccggcgacuccaucgacacccccaacuacgacguccagaagcacaucaacaagcucugcggcaugcuccucaucaccgaggacgccaaccacaaguucaccggcgucaucggcaugcucuacgccaugucccgccucggccgcgaggacaccaucaagauccuccgcgacgccggcuaccacgucaaggccaacggcgucgacgucaccacccaccgccaggacaucaacggcaaggagaugaaguucgagguccucacccucgccucccucaccaccgagauccagaucaacaucgagaucgagucccgcaaguccuacaagaagaugcucaaggagaugggcgaggucgcccccgaguaccgccacgacucccccgacugcggcaugaucauccucugcaucgccgcccucgucaucaccaagcucgccgccggcgaccgcuccggccucaccgccgucauccgccgcgccaacaacguccucaagaacgagaugaagcgcuacaagggccuccuccccaaggacaucgccaacuccuucuacgaggucuucgagaaguacccccacuucaucgacgucuucguccacuucggcaucgcccaguccuccacccgcggcggcucccgcgucgagggcaucuucgccggccucuucaugaacgccuacggcgccggccaggucaugcuccgcuggggcguccucgccaaguccgucaagaacaucaugcucggccacgccuccguccaggccgagauggagcaggucgucgaggucuacgaguacgcccagaagcucggcggcgaggccggcuucuaccacauccucaacaaccccaaggccucccuccucucccucacccaguucccccacuucuccuccgucguccucggcaacgccgccggccucggcaucaugggcgaguaccgcggcaccccccgcaaccaggaccucuacgacgccgccaaggccuacgccgagcagcucaaggagaacggcgucaucaacuacuccguccucgaccucaccgccgaggagcucgaggccaucaagcaccagcucaaccccaaggacaacgacgucgagcucugaggacuaguuauaagacugacuagcccgaugggccucccaacgggcccuccuccccuccuugcaccgagauuaauaaaaaaaaaaaaaaaaaaaaaaaaaaaaaaaaaaaaaaaaaaaaaaaaaaaaaaaaaaaaaaaaugcaucccccccccccccccccccccccccccccccaaaggcucuuuucagagccaccagaauu

SEQ ID NO: 20577 - RNA, 1393 nt, Artificial Sequence
  mRNA product Design i-3 comprising derived and/or modified sequence from HRSV(Memphis-37)__AIY60635.1__N (opt3)
gggagaaagcuuaccauggcccugagcaaggugaaacucaacgacacccuuaauaaggaucagcuguuguccucuucaaaauacacaauccaaagaaguacuggcgacagcauugauacgcccaacuaugacguccagaagcacauaaauaaauuaugcgggaugcugcuaaucaccgaggaugcuaaccauaaguucacaggaguuauugguaugcucuacgcaauguccaggcugggccgggaagacacuaucaagauucuucgcgaugccggguaucacgugaaagcgaauggaguagacgugaccacacaucgacaggauaucaacggcaaggagaugaaauuugaaguccugaccuuggcuucucucacuacagagauacagaucaauauugaaaucgagucgcguaagucauacaaaaagaugcugaaggagaugggugaaguggccccugaguauagacacgacagcccagauugugggaugauuauccugugcauagcagcccucguuauuaccaaauuagcugcaggagacaggaguggccugacggccgugauccggcgcgcuaacaauguccuuaagaacgaaaugaaaagauacaagggcuugcugccgaaagauauugccaauuccuucuaugagguguuugagaaguacccccauuucaucgacguauuuguucacuucgggaucgcgcaaucuagcacuaggggagguucccggguggaaggcauuuuugcagggcuauucaugaacgccuacggagcuggccaggucaugcuccgcuggggugugcuggccaaaucagugaagaauauaaugcuugggcacgcaaguguccaggcugagauggaacagguuguggagguauaugaauacgcccaaaagcugggaggcgaggcgggcuuuuaucauaucuugaacaauccuaaagccagccuccugucuuuaacccaguucccacacuuuuccucagugguccuggggaacgcagcuggacucgguauuaugggcgaguaccgagggacacccagaaaccaggaccuuuaugaugccgcuaaggccuacgcagaacagcugaaagagaauggagugaucaacuauagcguuuuggaccuaacugccgaggaacuggaagcuauaaagcaucaacucaauccuaaagauaacgacguggagcugugaggacuaguuauaagacugacuagcccgaugggccucccaacgggcccuccuccccuccuugcaccgagauuaauaaaaaaaaaaaaaaaaaaaaaaaaaaaaaaaaaaaaaaaaaaaaaaaaaaaaaaaaaaaaaaaaugcaucccccccccccccccccccccccccccccccaaaggcucuuuucagagccaccagaauu

SEQ ID NO: 20578 - RNA, 1393 nt, Artificial Sequence
  mRNA product Design i-3 comprising derived and/or modified sequence from HRSV(Memphis-37)__AIY60635.1__N (opt4)
gggagaaagcuuaccauggcccugagcaaggugaagcugaacgacacccugaacaaggaccagcugcugagcagcagcaaguacaccauccagagaagcaccggcgacagcaucgacacccccaacuacgacgugcagaagcacaucaacaagcugugcggcaugcugcugaucaccgaggacgccaaccacaaguucaccggcgugaucggcaugcuguacgccaugagcagacugggcagagaggacaccaucaagauccugagagacgccggcuaccacgugaaggccaacggcguggacgugaccacccacagacaggacaucaacggcaaggagaugaaguucgaggugcugacccuggccagccugaccaccgagauccagaucaacaucgagaucgagagcagaaagagcuacaagaagaugcugaaggagaugggcgagguggcccccgaguacagacacgacagccccgacugcggcaugaucauccugugcaucgccgcccuggugaucaccaagcuggccgccggcgacagaagcggccugaccgccgugaucagaagagccaacaacgugcugaagaacgagaugaagagauacaagggccugcugcccaaggacaucgccaacagcuucuacgagguguucgagaaguacccccacuucaucgacguguucgugcacuucggcaucgcccagagcagcaccagaggcggcagcagaguggagggcaucuucgccggccuguucaugaacgccuacggcgccggccaggugaugcugagauggggcgugcuggccaagagcgugaagaacaucaugcugggccacgccagcgugcaggccgagauggagcaggugguggagguguacgaguacgcccagaagcugggcggcgaggccggcuucuaccacauccugaacaaccccaaggccagccugcugagccugacccaguucccccacuucagcagcguggugcugggcaacgccgccggccugggcaucaugggcgaguacagaggcacccccagaaaccaggaccuguacgacgccgccaaggccuacgccgagcagcugaaggagaacggcgugaucaacuacagcgugcuggaccugaccgccgaggagcuggaggccaucaagcaccagcugaaccccaaggacaacgacguggagcugugaggacuaguuauaagacugacuagcccgaugggccucccaacgggcccuccuccccuccuugcaccgagauuaauaaaaaaaaaaaaaaaaaaaaaaaaaaaaaaaaaaaaaaaaaaaaaaaaaaaaaaaaaaaaaaaaugcaucccccccccccccccccccccccccccccccaaaggcucuuuucagagccaccagaauu

SEQ ID NO: 20579 - RNA, 1393 nt, Artificial Sequence
  mRNA product Design i-3 comprising derived and/or modified sequence from HRSV(Memphis-37)__AIY60635.1__N (opt5)
gggagaaagcuuaccauggcccugagcaaggugaaacucaacgacacccugaauaaggaucagcuucuguccucuagcaaauacacaauccaaagauccacgggcgacucuauugauacccccaacuaugacguccagaagcacaucaauaaacucugcgggaugcugcuuauuacagaggaugcuaaccauaaguucaccggaguuaucggcaugcuguacgccaugagccggcucgggcgcgaagacacaauuaagauccugagagaugcgggauaucacgugaaagcuaauggcguggacgucaccacacaucggcaggauaucaacgggaaggagaugaaauuugaagugcugacccucgccucccugacgaccgagauucagaucaauauugaaaucgagucucgcaagagcuacaaaaagaugcuuaaggagaugggagaaguugccccugaguauagacacgacuccccggauuguggcaugauuauccugugcauugcugcccucgugaucacaaaacuggcugccggcgaccggagcgggcuuaccgcggucauccgcagagccaacaaugugcugaagaacgaaaugaaacgguacaagggacuccugcccaaagauauugcuaauucuuucuaugagguuuuugagaaguacccucauuucaucgacguguuuguccacuucggcauugcccaauccagcacacgcgggggaucuagaguggaaggcaucuuugcugggcuguucaugaacgccuacggagcgggccaggugaugcuccgguggggcguccuggccaaauccguuaagaauauuaugcuugggcacgcuagcgugcaggccgagauggaacagguggucgagguguaugaauacgcucaaaagcugggaggcgaggccggguuuuaucauauccucaacaaucccaaagccucucugcuuucccugacccaguucccucacuuuagcuccguugugcucggaaacgcugcgggccuggggaucaugggagaguaccgcggcacgcccagaaaccaggaccuguaugaugccgcuaaggccuacgccgaacagcucaaagagaauggcgucauuaacuauucugugcuggaccuuacagcugaggaacuggaagccaucaagcaucaacucaauccuaaagauaacgacguugagcugugaggacuaguuauaagacugacuagcccgaugggccucccaacgggcccuccuccccuccuugcaccgagauuaauaaaaaaaaaaaaaaaaaaaaaaaaaaaaaaaaaaaaaaaaaaaaaaaaaaaaaaaaaaaaaaaaugcaucccccccccccccccccccccccccccccccaaaggcucuuuucagagccaccagaauu

SEQ ID NO: 20580 - RNA, 1393 nt, Artificial Sequence
  mRNA product Design i-3 comprising derived and/or modified sequence from HRSV(Memphis-37)__AIY60635.1__N (opt6)
gggagaaagcuuaccauggccuuaaguaaaguaaaauuaaacgacacacuaaacaaagaccaauuacucucaucaucgaaauauacaauacaaagauccacaggagacuccauagauacaccaaauuacgacguacaaaaacauauaaacaaacucugcggaauguuauuaauaacagaagacgcaaaccacaaauucacaggagucauagguaugcuauacgcaaugucaagauuaggaagagaagauacaauaaaaauacuaagagacgcaggauaccacguaaaagcaaacggaguagacguaacaacacauagacaagauauaaacgguaaagaaaugaaauucgaaguacuaacacuagccagucuaacaacagaaauacaaauaaacauagaaauagaaagccgaaaaucauacaaaaaaauguuaaaagaaaugggggaaguagcacccgaauacagacaugauucaccugacugcggaaugauaauacucugcauagcggcauuagucauaacaaaacuagccgcaggagacagaagcggauuaacagcaguaauaagaagagcaaauaauguauuaaaaaaugaaaugaaaagguauaaaggauuacuaccaaaagauauagcaaacucauucuaugaaguuuucgaaaaauacccacacuucauagacgucuucguacacuuuggaauagcacaaagcagcacaagaggaggaagcagaguagaaggaauauucgcaggacuauucaugaaugcauacggagccggacaaguaaugcuaagauggggaguuuuagcaaaaagcguaaaaaacauaauguuaggacacgccuccguccaagccgaaauggaacaaguaguagaaguauacgaauaugcacaaaaacuaggaggagaagcaggauucuaucacauacucaauaacccaaaagcaucacuauugagcuuaacacaauucccacauuuuucauccguaguccuaggaaaugcagcaggcuuaggaauaaugggagaauacagaggcacaccaagaaaucaagacuuauacgaugcagcaaaagcauacgcagaacaacuaaaagaaaacggaguaauaaacuacucaguauuagauuuaacagcagaagaauuagaagcaauaaaacaucaacuaaauccuaaggauaaugauguagaacucuaaggacuaguuauaagacugacuagcccgaugggccucccaacgggcccuccuccccuccuugcaccgagauuaauaaaaaaaaaaaaaaaaaaaaaaaaaaaaaaaaaaaaaaaaaaaaaaaaaaaaaaaaaaaaaaaaugcaucccccccccccccccccccccccccccccccaaaggcucuuuucagagccaccagaauu

SEQ ID NO: 20581 - RNA, 1393 nt, Artificial Sequence
  mRNA product Design i-3 comprising derived and/or modified sequence from HRSV(Memphis-37)__AIY60635.1__N (opt11)
gggagaaagcuuaccauggcccuaagcaaagucaaacucaacgacacacuaaacaaagaccaacuccucagcuccagcaaauacaccauccaacgauccaccggcgacuccauagacacccccaacuacgacguccaaaaacacaucaacaaacuaugcggcaugcuccuaaucacagaagacgccaaccacaaauucaccggagucaucggcaugcucuacgccaugagccgccucggccgagaagacacaaucaaaauacuaagagacgccggcuaccacguaaaagccaacggcguagacguaaccacccaccgccaagacaucaacggcaaagaaaugaaauucgaaguucucacccucgccucacuaaccacggaaauccaaauaaacauugaaaucgaaagcagaaaauccuacaaaaagaugcuaaaagaaaugggcgagguagccccagaauaccgccacgacagccccgacugcggaaugaucauccucugcauugcagcccucgucaucaccaaacuagccgccggcgacagaagcggccuaaccgcaguaauccgccgagccaacaacguacucaaaaacgaaaugaaacgcuacaaaggccuccuccccaaagacaucgccaacagcuucuacgaaguauucgaaaaauacccgcacuucaucgacgucuucguacacuucggcauagcccaaagcagcacacgaggcggcucccgcgucgaaggaauauucgccggccuguucaugaacgcauacggagcgggccaagucaugcuccgcugggguguacuagccaaguccgucaaaaacaucaugcuagggcacgcaagcguacaagccgaaauggaacaaguagucgaagucuacgaauacgcacaaaaacuaggcggcgaagccggcuucuaccacauccuaaacaaccccaaagccucauuacucucccucacccaauuuccucacuucuccagcgucguccucggaaacgccgccggccuaggcauaaugggggaauaccgcggcaccccgcgcaaccaagaccucuacgacgcagcaaaagccuacgcagaacaacuaaaagaaaacggagucaucaacuacagcguacuggaccuaaccgccgaagaacucgaagccauaaaacaccaacucaaccccaaagacaacgacgucgagcucuaaggacuaguuauaagacugacuagcccgaugggccucccaacgggcccuccuccccuccuugcaccgagauuaauaaaaaaaaaaaaaaaaaaaaaaaaaaaaaaaaaaaaaaaaaaaaaaaaaaaaaaaaaaaaaaaaugcaucccccccccccccccccccccccccccccccaaaggcucuuuucagagccaccagaauu

SEQ ID NO: 20582 - protein, 241 aa, Artificial Sequence; identical to SEQ ID NO: 11006
  derived and/or modified protein sequence (wt) from HRSV(Memphis-37)__AIY60637.1__P

SEQ ID NO: 20583 - RNA, 726 nt, Artificial Sequence
  derived and/or modified CDS sequence (wt) from HRSV(Memphis-37)__AIY60637.1__P
auggaaaaguuugcuccugaauuccauggagaagacgcaaacaacagagccacuaaauuccuagaaucaauaaagggcaaauucacaucaccuaaagaucccaagaaaaaagauaguaucauaucugucaacucaauagauauagaaguaaccaaagaaagcccuauaacuucaaauucaaccauuauaaacccuacaaaugagacagaugauacugcagggaacaagcccaauuaucaaagaaaaccacuagugaguuucaaagaagacccuacgccaagugauaaucccuuuucaaaacuauacaaagaaaccauagaaacauuugauaacaaugaagaagaaucuagcuauucauaugaagaaauaaaugaucagacaaacgauaauauaacagcaagauuagauaggauugaugaaaaauuaagugaaauacuaggaaugcuucacacacuaguaguagcaagugcaggaccuacaucugcucgggaugguauaagagaugccaugguugguuuaagagaagaaaugauagaaaaaaucagaacugaagcauugaugaccaaugauagauuagaagcuauggcaagacucaggaaugaggaaagugaaaagauggcaaaagacacaucagaugaagugucucucaauccaacaucagagaaauugaacaaccuguuggaaggaaaugauagugauaaugaucuaucacuugaagauuucuga

SEQ ID NO: 20584 - RNA, 726 nt, Artificial Sequence
  derived and/or modified CDS sequence (opt1) from HRSV(Memphis-37)__AIY60637.1__P
auggagaaguucgcccccgaguuccacggcgaggacgccaacaaccgcgcgaccaaguuccuggagagcaucaaggggaaguucaccuccccgaaggaccccaagaagaaggacagcaucaucuccgugaacagcaucgacaucgaggucacgaaggagucccccaucaccagcaacuccaccaucaucaaccccaccaacgagacggacgacaccgccggcaacaagccgaacuaccagcggaagccccucgugagcuucaaggaggaccccacccccuccgacaacccguucagcaagcuguacaaggagaccaucgagacguucgacaacaacgaggaggaguccagcuacuccuacgaggagaucaacgaccagaccaacgacaacaucaccgcccgccuggaccggaucgacgagaagcucagcgagauccuggggaugcugcacacccucguggucgccuccgccggccccacgagcgcgcgcgacgggauccgggacgccauggugggccugcgcgaggagaugaucgagaagauccggaccgaggcccugaugaccaacgaccgccucgaggccauggcgcggcugcgcaacgaggaguccgagaagauggccaaggacaccagcgacgaggugucccugaaccccacgagcgagaagcucaacaaccugcuggagggcaacgacagcgacaacgaccucucccuggaggacuucuga

SEQ ID NO: 20585 - RNA, 726 nt, Artificial Sequence
  derived and/or modified CDS sequence (opt2) from HRSV(Memphis-37)__AIY60637.1__P
auggagaaguucgcccccgaguuccacggcgaggacgccaacaaccgcgccaccaaguuccucgaguccaucaagggcaaguucaccucccccaaggaccccaagaagaaggacuccaucaucuccgucaacuccaucgacaucgaggucaccaaggagucccccaucaccuccaacuccaccaucaucaaccccaccaacgagaccgacgacaccgccggcaacaagcccaacuaccagcgcaagccccucgucuccuucaaggaggaccccacccccuccgacaaccccuucuccaagcucuacaaggagaccaucgagaccuucgacaacaacgaggaggaguccuccuacuccuacgaggagaucaacgaccagaccaacgacaacaucaccgcccgccucgaccgcaucgacgagaagcucuccgagauccucggcaugcuccacacccucgucgucgccuccgccggccccaccuccgcccgcgacggcauccgcgacgccauggucggccuccgcgaggagaugaucgagaagauccgcaccgaggcccucaugaccaacgaccgccucgaggccauggcccgccuccgcaacgaggaguccgagaagauggccaaggacaccuccgacgaggucucccucaaccccaccuccgagaagcucaacaaccuccucgagggcaacgacuccgacaacgaccucucccucgaggacuucuga

SEQ ID NO: 20586 - RNA, 726 nt, Artificial Sequence
  derived and/or modified CDS sequence (opt3) from HRSV(Memphis-37)__AIY60637.1__P
auggagaaguucgcccccgaauuucacggcgaggacgcuaacaauagagcaaccaaauuccuggaaagcaucaaggggaaauuuacauccccuaaggauccgaaaaagaaggacucuauuauaucagugaacaguaucgauauugaggucacuaaagaaagcccaaucacguccaauucuaccauuaucaaccccacaaaugagacugacgauaccgccggaaacaagccuaauuaccagaggaaaccacucguuucguucaaggaggaccccacaccuucagauaacccauuuagcaaacuuuauaaggaaaccauagagacuuucgacaauaacgaagaggagaguuccuacucuuaugaagagaucaaugaucaaacaaacgacaauauuaccgcgcggcuggaucgcaucgacgaaaaguugagcgagauuuuagguaugcugcauacgcuagugguagcuuccgccggccccacuucagcacgagaugggauccgugacgccauggugggacucagagaagagaugauagagaaaauuaggaccgaagcucugaugacaaacgaccggcuugaggcaauggcccgccugagaaaugaagagagugaaaagauggcuaaagauacuagcgacgaggucucuuugaacccuaccuccgagaagcucaacaaucugcuggaaggcaacgauucagacaaugaucucagcuuagaggacuuuuga

SEQ ID NO: 20587 - RNA, 726 nt, Artificial Sequence
  derived and/or modified CDS sequence (opt4) from HRSV(Memphis-37)__AIY60637.1__P
auggagaaguucgcccccgaguuccacggcgaggacgccaacaacagagccaccaaguuccuggagagcaucaagggcaaguucaccagccccaaggaccccaagaagaaggacagcaucaucagcgugaacagcaucgacaucgaggugaccaaggagagccccaucaccagcaacagcaccaucaucaaccccaccaacgagaccgacgacaccgccggcaacaagcccaacuaccagagaaagccccuggugagcuucaaggaggaccccacccccagcgacaaccccuucagcaagcuguacaaggagaccaucgagaccuucgacaacaacgaggaggagagcagcuacagcuacgaggagaucaacgaccagaccaacgacaacaucaccgccagacuggacagaaucgacgagaagcugagcgagauccugggcaugcugcacacccuggugguggccagcgccggccccaccagcgccagagacggcaucagagacgccauggugggccugagagaggagaugaucgagaagaucagaaccgaggcccugaugaccaacgacagacuggaggccauggccagacugagaaacgaggagagcgagaagauggccaaggacaccagcgacgaggugagccugaaccccaccagcgagaagcugaacaaccugcuggagggcaacgacagcgacaacgaccugagccuggaggacuucuga

SEQ ID NO: 20588 - RNA, 726 nt, Artificial Sequence
  derived and/or modified CDS sequence (opt5) from HRSV(Memphis-37)__AIY60637.1__P
auggagaaguucgcccccgaauuucacggcgaggacgcuaacaauagagccaccaaauuccuggaaagcaucaaggggaaauuuacauccccuaaggauccgaaaaagaaggacucuauuaucagcgugaacuccauugauaucgaggucacgaaagaaucucccauuaccagcaauuccacaaucaucaacccuaccaaugagacagacgauaccgcgggaaacaagcccaauuaccagcggaaaccucucguuucuuucaaggaggaccccacaccuagcgauaacccguuuuccaaacuguauaaggaaaccauugagacguucgacaauaacgaagaggagagcucuuacuccuaugaagagaucaaugaucaaaccaacgacaauauuacagcucgccuugauagaaucgacgaaaagcugagcgagauucucggcaugcugcauacccuugugguggccucugccgggcccacauccgcucgggauggaauccgcgacgccauggucggccugagagaagagaugauugagaaaauccggaccgaagcucucaugacgaacgaccgccuggaggccauggcgagacugcggaaugaagagagcgaaaagauggccaaagauacaucugacgaggugucccucaacccuaccagcgagaagcugaacaaucuucuggaagggaacgauuccgacaaugaucucucucuggaggacuuuuga

SEQ ID NO: 20589 - RNA, 726 nt, Artificial Sequence
  derived and/or modified CDS sequence (opt6) from HRSV(Memphis-37)__AIY60637.1__P
auggaaaaauucgcaccagaauuccacggagaagacgcaaacaacagagcaacaaaauuccuagaaucaauaaaaggaaaauucacaagcccaaaagaucccaaaaaaaaagacucaaucauaagcguaaacucaauagauauagaaguaacaaaagaaaguccaauaacaagcaacaguacaauaauaaacccaacaaaugaaacagacgauacagcaggcaacaaaccaaacuaccaaagaaaaccgcuaguaaguuucaaagaagacccaacaccaagcgauaacccauuuucaaaauuauacaaagaaacaauagaaacauucgacaacaacgaagaagaaagcucauacucauacgaagaaauaaacgaccaaacaaacgacaacauaacagcgagauuagacagaauagacgaaaaacuaucagaaauacuaggcauguuacacacauuaguaguagcaagcgcaggaccaacaucagcaagagacggaauccgagacgcaaugguaggacuaagagaagaaaugauagaaaaaauaagaacagaagcacuaaugacaaacgacagacuagaagccauggcaagacuaagaaacgaagaaucagaaaaaauggcaaaagacacaucagacgaaguaucacuaaacccaacaagcgaaaaacuaaacaaccuauuagaaggaaacgacagcgacaacgaccuaucacucgaagacuucuaa

SEQ ID NO: 20590 - RNA, 726 nt, Artificial Sequence
  derived and/or modified CDS sequence (opt11) from HRSV(Memphis-37)__AIY60637.1__P
auggaaaaauucgccccagaauuucacggcgaagacgccaacaaccgagccaccaaauuccucgaaucaauaaaaggcaaauucacaucccccaaagaccccaaaaaaaaagacucgaucaucuccgugaacucaaucgacauagaagucaccaaagaaagccccaucaccuccaacagcaccaucaucaaccccacaaacgaaacagacgacaccgccggcaacaaaccaaacuaccaacgaaaaccccucgucagcuucaaagaagaccccacaccaagcgacaaccccuucuccaaacucuacaaagaaacaauagaaaccuucgacaacaacgaagaagaaagcucguacucauacgaagaaaucaacgaccaaaccaacgacaacaucaccgcccgccucgaccgcaucgacgaaaaacucuccgaaauccucggaaugcuccacacacucgucgucgccagcgccggccccaccucagcccgggacggcauccgcgacgccauggugggccuccgcgaggaaaugaucgaaaaaauccgcacagaagcccucaugaccaacgaccgccucgaagccauggcccgccuccgcaacgaagaauccgaaaaaauggccaaagacaccuccgacgaagucucacuaaaccccaccuccgaaaaacuaaacaaccuccuagaaggcaacgacagcgacaacgaccucucccuagaagacuucuaa

SEQ ID NO: 20591 - RNA, 1002 nt, Artificial Sequence
  mRNA product Design a-1 comprising derived and/or modified sequence from HRSV(Memphis-37)__AIY60637.1__P (wt)
gggagagucccgcagucggcguccagcggcucugcuuguucgugugugugucguugcaggccuuauucaagcuuaccauggaaaaguuugcuccugaauuccauggagaagacgcaaacaacagagccacuaaauuccuagaaucaauaaagggcaaauucacaucaccuaaagaucccaagaaaaaagauaguaucauaucugucaacucaauagauauagaaguaaccaaagaaagcccuauaacuucaaauucaaccauuauaaacccuacaaaugagacagaugauacugcagggaacaagcccaauuaucaaagaaaaccacuagugaguuucaaagaagacccuacgccaagugauaaucccuuuucaaaacuauacaaagaaaccauagaaacauuugauaacaaugaagaagaaucuagcuauucauaugaagaaauaaaugaucagacaaacgauaauauaacagcaagauuagauaggauugaugaaaaauuaagugaaauacuaggaaugcuucacacacuaguaguagcaagugcaggaccuacaucugcucgggaugguauaagagaugccaugguugguuuaagagaagaaaugauagaaaaaaucagaacugaagcauugaugaccaaugauagauuagaagcuauggcaagacucaggaaugaggaaagugaaaagauggcaaaagacacaucagaugaagugucucucaauccaacaucagagaaauugaacaaccuguuggaaggaaaugauagugauaaugaucuaucacuugaagauuucugaggacuagucccuguucccagagcccacuuuuuuuucuuuuuuugaaauaaaauagccugucuuucagaucuaaaaaaaaaaaaaaaaaaaaaaaaaaaaaaaaaaaaaaaaaaaaaaaaaaaaaaaaaaaaaaaaugcaucccccccccccccccccccccccccccccccaaaggcucuuuucagagccaccagaauu

SEQ ID NO: 20592 - RNA, 1002 nt, Artificial Sequence
  mRNA product Design a-1 comprising derived and/or modified sequence from HRSV(Memphis-37)__AIY60637.1__P (opt1)
gggagagucccgcagucggcguccagcggcucugcuuguucgugugugugucguugcaggccuuauucaagcuuaccauggagaaguucgcccccgaguuccacggcgaggacgccaacaaccgcgcgaccaaguuccuggagagcaucaaggggaaguucaccuccccgaaggaccccaagaagaaggacagcaucaucuccgugaacagcaucgacaucgaggucacgaaggagucccccaucaccagcaacuccaccaucaucaaccccaccaacgagacggacgacaccgccggcaacaagccgaacuaccagcggaagccccucgugagcuucaaggaggaccccacccccuccgacaacccguucagcaagcuguacaaggagaccaucgagacguucgacaacaacgaggaggaguccagcuacuccuacgaggagaucaacgaccagaccaacgacaacaucaccgcccgccuggaccggaucgacgagaagcucagcgagauccuggggaugcugcacacccucguggucgccuccgccggccccacgagcgcgcgcgacgggauccgggacgccauggugggccugcgcgaggagaugaucgagaagauccggaccgaggcccugaugaccaacgaccgccucgaggccauggcgcggcugcgcaacgaggaguccgagaagauggccaaggacaccagcgacgaggugucccugaaccccacgagcgagaagcucaacaaccugcuggagggcaacgacagcgacaacgaccucucccuggaggacuucugaggacuagucccuguucccagagcccacuuuuuuuucuuuuuuugaaauaaaauagccugucuuucagaucuaaaaaaaaaaaaaaaaaaaaaaaaaaaaaaaaaaaaaaaaaaaaaaaaaaaaaaaaaaaaaaaaugcaucccccccccccccccccccccccccccccccaaaggcucuuuucagagccaccagaauu

SEQ ID NO: 20593 - RNA, 1002 nt, Artificial Sequence
  mRNA product Design a-1 comprising derived and/or modified sequence from HRSV(Memphis-37)__AIY60637.1__P (opt2)
gggagagucccgcagucggcguccagcggcucugcuuguucgugugugugucguugcaggccuuauucaagcuuaccauggagaaguucgcccccgaguuccacggcgaggacgccaacaaccgcgccaccaaguuccucgaguccaucaagggcaaguucaccucccccaaggaccccaagaagaaggacuccaucaucuccgucaacuccaucgacaucgaggucaccaaggagucccccaucaccuccaacuccaccaucaucaaccccaccaacgagaccgacgacaccgccggcaacaagcccaacuaccagcgcaagccccucgucuccuucaaggaggaccccacccccuccgacaaccccuucuccaagcucuacaaggagaccaucgagaccuucgacaacaacgaggaggaguccuccuacuccuacgaggagaucaacgaccagaccaacgacaacaucaccgcccgccucgaccgcaucgacgagaagcucuccgagauccucggcaugcuccacacccucgucgucgccuccgccggccccaccuccgcccgcgacggcauccgcgacgccauggucggccuccgcgaggagaugaucgagaagauccgcaccgaggcccucaugaccaacgaccgccucgaggccauggcccgccuccgcaacgaggaguccgagaagauggccaaggacaccuccgacgaggucucccucaaccccaccuccgagaagcucaacaaccuccucgagggcaacgacuccgacaacgaccucucccucgaggacuucugaggacuagucccuguucccagagcccacuuuuuuuucuuuuuuugaaauaaaauagccugucuuucagaucuaaaaaaaaaaaaaaaaaaaaaaaaaaaaaaaaaaaaaaaaaaaaaaaaaaaaaaaaaaaaaaaaugcaucccccccccccccccccccccccccccccccaaaggcucuuuucagagccaccagaauu

SEQ ID NO: 20594 - RNA, 1002 nt, Artificial Sequence
  mRNA product Design a-1 comprising derived and/or modified sequence from HRSV(Memphis-37)__AIY60637.1__P (opt3)
gggagagucccgcagucggcguccagcggcucugcuuguucgugugugugucguugcaggccuuauucaagcuuaccauggagaaguucgcccccgaauuucacggcgaggacgcuaacaauagagcaaccaaauuccuggaaagcaucaaggggaaauuuacauccccuaaggauccgaaaaagaaggacucuauuauaucagugaacaguaucgauauugaggucacuaaagaaagcccaaucacguccaauucuaccauuaucaaccccacaaaugagacugacgauaccgccggaaacaagccuaauuaccagaggaaaccacucguuucguucaaggaggaccccacaccuucagauaacccauuuagcaaacuuuauaaggaaaccauagagacuuucgacaauaacgaagaggagaguuccuacucuuaugaagagaucaaugaucaaacaaacgacaauauuaccgcgcggcuggaucgcaucgacgaaaaguugagcgagauuuuagguaugcugcauacgcuagugguagcuuccgccggccccacuucagcacgagaugggauccgugacgccauggugggacucagagaagagaugauagagaaaauuaggaccgaagcucugaugacaaacgaccggcuugaggcaauggcccgccugagaaaugaagagagugaaaagauggcuaaagauacuagcgacgaggucucuuugaacccuaccuccgagaagcucaacaaucugcuggaaggcaacgauucagacaaugaucucagcuuagaggacuuuugaggacuagucccuguucccagagcccacuuuuuuuucuuuuuuugaaauaaaauagccugucuuucagaucuaaaaaaaaaaaaaaaaaaaaaaaaaaaaaaaaaaaaaaaaaaaaaaaaaaaaaaaaaaaaaaaaugcaucccccccccccccccccccccccccccccccaaaggcucuuuucagagccaccagaauu

SEQ ID NO: 20595 - RNA, 1002 nt, Artificial Sequence
  mRNA product Design a-1 comprising derived and/or modified sequence from HRSV(Memphis-37)__AIY60637.1__P (opt4)
gggagagucccgcagucggcguccagcggcucugcuuguucgugugugugucguugcaggccuuauucaagcuuaccauggagaaguucgcccccgaguuccacggcgaggacgccaacaacagagccaccaaguuccuggagagcaucaagggcaaguucaccagccccaaggaccccaagaagaaggacagcaucaucagcgugaacagcaucgacaucgaggugaccaaggagagccccaucaccagcaacagcaccaucaucaaccccaccaacgagaccgacgacaccgccggcaacaagcccaacuaccagagaaagccccuggugagcuucaaggaggaccccacccccagcgacaaccccuucagcaagcuguacaaggagaccaucgagaccuucgacaacaacgaggaggagagcagcuacagcuacgaggagaucaacgaccagaccaacgacaacaucaccgccagacuggacagaaucgacgagaagcugagcgagauccugggcaugcugcacacccuggugguggccagcgccggccccaccagcgccagagacggcaucagagacgccauggugggccugagagaggagaugaucgagaagaucagaaccgaggcccugaugaccaacgacagacuggaggccauggccagacugagaaacgaggagagcgagaagauggccaaggacaccagcgacgaggugagccugaaccccaccagcgagaagcugaacaaccugcuggagggcaacgacagcgacaacgaccugagccuggaggacuucugaggacuagucccuguucccagagcccacuuuuuuuucuuuuuuugaaauaaaauagccugucuuucagaucuaaaaaaaaaaaaaaaaaaaaaaaaaaaaaaaaaaaaaaaaaaaaaaaaaaaaaaaaaaaaaaaaugcaucccccccccccccccccccccccccccccccaaaggcucuuuucagagccaccagaauu

SEQ ID NO: 20596 - RNA, 1002 nt, Artificial Sequence
  mRNA product Design a-1 comprising derived and/or modified sequence from HRSV(Memphis-37)__AIY60637.1__P (opt5)
gggagagucccgcagucggcguccagcggcucugcuuguucgugugugugucguugcaggccuuauucaagcuuaccauggagaaguucgcccccgaauuucacggcgaggacgcuaacaauagagccaccaaauuccuggaaagcaucaaggggaaauuuacauccccuaaggauccgaaaaagaaggacucuauuaucagcgugaacuccauugauaucgaggucacgaaagaaucucccauuaccagcaauuccacaaucaucaacccuaccaaugagacagacgauaccgcgggaaacaagcccaauuaccagcggaaaccucucguuucuuucaaggaggaccccacaccuagcgauaacccguuuuccaaacuguauaaggaaaccauugagacguucgacaauaacgaagaggagagcucuuacuccuaugaagagaucaaugaucaaaccaacgacaauauuacagcucgccuugauagaaucgacgaaaagcugagcgagauucucggcaugcugcauacccuugugguggccucugccgggcccacauccgcucgggauggaauccgcgacgccauggucggccugagagaagagaugauugagaaaauccggaccgaagcucucaugacgaacgaccgccuggaggccauggcgagacugcggaaugaagagagcgaaaagauggccaaagauacaucugacgaggugucccucaacccuaccagcgagaagcugaacaaucuucuggaagggaacgauuccgacaaugaucucucucuggaggacuuuugaggacuagucccuguucccagagcccacuuuuuuuucuuuuuuugaaauaaaauagccugucuuucagaucuaaaaaaaaaaaaaaaaaaaaaaaaaaaaaaaaaaaaaaaaaaaaaaaaaaaaaaaaaaaaaaaaugcaucccccccccccccccccccccccccccccccaaaggcucuuuucagagccaccagaauu

SEQ ID NO: 20597 - RNA, 1002 nt, Artificial Sequence
  mRNA product Design a-1 comprising derived and/or modified sequence from HRSV(Memphis-37)__AIY60637.1__P (opt6)
gggagagucccgcagucggcguccagcggcucugcuuguucgugugugugucguugcaggccuuauucaagcuuaccauggaaaaauucgcaccagaauuccacggagaagacgcaaacaacagagcaacaaaauuccuagaaucaauaaaaggaaaauucacaagcccaaaagaucccaaaaaaaaagacucaaucauaagcguaaacucaauagauauagaaguaacaaaagaaaguccaauaacaagcaacaguacaauaauaaacccaacaaaugaaacagacgauacagcaggcaacaaaccaaacuaccaaagaaaaccgcuaguaaguuucaaagaagacccaacaccaagcgauaacccauuuucaaaauuauacaaagaaacaauagaaacauucgacaacaacgaagaagaaagcucauacucauacgaagaaauaaacgaccaaacaaacgacaacauaacagcgagauuagacagaauagacgaaaaacuaucagaaauacuaggcauguuacacacauuaguaguagcaagcgcaggaccaacaucagcaagagacggaauccgagacgcaaugguaggacuaagagaagaaaugauagaaaaaauaagaacagaagcacuaaugacaaacgacagacuagaagccauggcaagacuaagaaacgaagaaucagaaaaaauggcaaaagacacaucagacgaaguaucacuaaacccaacaagcgaaaaacuaaacaaccuauuagaaggaaacgacagcgacaacgaccuaucacucgaagacuucuaaggacuagucccuguucccagagcccacuuuuuuuucuuuuuuugaaauaaaauagccugucuuucagaucuaaaaaaaaaaaaaaaaaaaaaaaaaaaaaaaaaaaaaaaaaaaaaaaaaaaaaaaaaaaaaaaaugcaucccccccccccccccccccccccccccccccaaaggcucuuuucagagccaccagaauu

SEQ ID NO: 20598 - RNA, 1002 nt, Artificial Sequence
  mRNA product Design a-1 comprising derived and/or modified sequence from HRSV(Memphis-37)__AIY60637.1__P (opt11)
gggagagucccgcagucggcguccagcggcucugcuuguucgugugugugucguugcaggccuuauucaagcuuaccauggaaaaauucgccccagaauuucacggcgaagacgccaacaaccgagccaccaaauuccucgaaucaauaaaaggcaaauucacaucccccaaagaccccaaaaaaaaagacucgaucaucuccgugaacucaaucgacauagaagucaccaaagaaagccccaucaccuccaacagcaccaucaucaaccccacaaacgaaacagacgacaccgccggcaacaaaccaaacuaccaacgaaaaccccucgucagcuucaaagaagaccccacaccaagcgacaaccccuucuccaaacucuacaaagaaacaauagaaaccuucgacaacaacgaagaagaaagcucguacucauacgaagaaaucaacgaccaaaccaacgacaacaucaccgcccgccucgaccgcaucgacgaaaaacucuccgaaauccucggaaugcuccacacacucgucgucgccagcgccggccccaccucagcccgggacggcauccgcgacgccauggugggccuccgcgaggaaaugaucgaaaaaauccgcacagaagcccucaugaccaacgaccgccucgaagccauggcccgccuccgcaacgaagaauccgaaaaaauggccaaagacaccuccgacgaagucucacuaaaccccaccuccgaaaaacuaaacaaccuccuagaaggcaacgacagcgacaacgaccucucccuagaagacuucuaaggacuagucccuguucccagagcccacuuuuuuuucuuuuuuugaaauaaaauagccugucuuucagaucuaaaaaaaaaaaaaaaaaaaaaaaaaaaaaaaaaaaaaaaaaaaaaaaaaaaaaaaaaaaaaaaaugcaucccccccccccccccccccccccccccccccaaaggcucuuuucagagccaccagaauu

SEQ ID NO: 20599 - RNA, 1021 nt, Artificial Sequence
  mRNA product Design a-2 comprising derived and/or modified sequence from HRSV(Memphis-37)__AIY60637.1__P (wt)
gggagaguccgcucagccagguugcagaagcggcuuagcguguguccuaaucuucucucugcguguagguaggccugugccgcaaacaagcuuaccauggaaaaguuugcuccugaauuccauggagaagacgcaaacaacagagccacuaaauuccuagaaucaauaaagggcaaauucacaucaccuaaagaucccaagaaaaaagauaguaucauaucugucaacucaauagauauagaaguaaccaaagaaagcccuauaacuucaaauucaaccauuauaaacccuacaaaugagacagaugauacugcagggaacaagcccaauuaucaaagaaaaccacuagugaguuucaaagaagacccuacgccaagugauaaucccuuuucaaaacuauacaaagaaaccauagaaacauuugauaacaaugaagaagaaucuagcuauucauaugaagaaauaaaugaucagacaaacgauaauauaacagcaagauuagauaggauugaugaaaaauuaagugaaauacuaggaaugcuucacacacuaguaguagcaagugcaggaccuacaucugcucgggaugguauaagagaugccaugguugguuuaagagaagaaaugauagaaaaaaucagaacugaagcauugaugaccaaugauagauuagaagcuauggcaagacucaggaaugaggaaagugaaaagauggcaaaagacacaucagaugaagugucucucaauccaacaucagagaaauugaacaaccuguuggaaggaaaugauagugauaaugaucuaucacuugaagauuucugaggacuagucccuguucccagagcccacuuuuuuuucuuuuuuugaaauaaaauagccugucuuucagaucuaaaaaaaaaaaaaaaaaaaaaaaaaaaaaaaaaaaaaaaaaaaaaaaaaaaaaaaaaaaaaaaaugcaucccccccccccccccccccccccccccccccaaaggcucuuuucagagccaccagaauu

SEQ ID NO: 20600 - RNA, 1021 nt, Artificial Sequence
  mRNA product Design a-2 comprising derived and/or modified sequence from HRSV(Memphis-37)__AIY60637.1__P (opt1)
gggagaguccgcucagccagguugcagaagcggcuuagcguguguccuaaucuucucucugcguguagguaggccugugccgcaaacaagcuuaccauggagaaguucgcccccgaguuccacggcgaggacgccaacaaccgcgcgaccaaguuccuggagagcaucaaggggaaguucaccuccccgaaggaccccaagaagaaggacagcaucaucuccgugaacagcaucgacaucgaggucacgaaggagucccccaucaccagcaacuccaccaucaucaaccccaccaacgagacggacgacaccgccggcaacaagccgaacuaccagcggaagccccucgugagcuucaaggaggaccccacccccuccgacaacccguucagcaagcuguacaaggagaccaucgagacguucgacaacaacgaggaggaguccagcuacuccuacgaggagaucaacgaccagaccaacgacaacaucaccgcccgccuggaccggaucgacgagaagcucagcgagauccuggggaugcugcacacccucguggucgccuccgccggccccacgagcgcgcgcgacgggauccgggacgccauggugggccugcgcgaggagaugaucgagaagauccggaccgaggcccugaugaccaacgaccgccucgaggccauggcgcggcugcgcaacgaggaguccgagaagauggccaaggacaccagcgacgaggugucccugaaccccacgagcgagaagcucaacaaccugcuggagggcaacgacagcgacaacgaccucucccuggaggacuucugaggacuagucccuguucccagagcccacuuuuuuuucuuuuuuugaaauaaaauagccugucuuucagaucuaaaaaaaaaaaaaaaaaaaaaaaaaaaaaaaaaaaaaaaaaaaaaaaaaaaaaaaaaaaaaaaaugcaucccccccccccccccccccccccccccccccaaaggcucuuuucagagccaccagaauu

SEQ ID NO: 20601 - RNA, 1021 nt, Artificial Sequence
  mRNA product Design a-2 comprising derived and/or modified sequence from HRSV(Memphis-37)__AIY60637.1__P (opt2)
gggagaguccgcucagccagguugcagaagcggcuuagcguguguccuaaucuucucucugcguguagguaggccugugccgcaaacaagcuuaccauggagaaguucgcccccgaguuccacggcgaggacgccaacaaccgcgccaccaaguuccucgaguccaucaagggcaaguucaccucccccaaggaccccaagaagaaggacuccaucaucuccgucaacuccaucgacaucgaggucaccaaggagucccccaucaccuccaacuccaccaucaucaaccccaccaacgagaccgacgacaccgccggcaacaagcccaacuaccagcgcaagccccucgucuccuucaaggaggaccccacccccuccgacaaccccuucuccaagcucuacaaggagaccaucgagaccuucgacaacaacgaggaggaguccuccuacuccuacgaggagaucaacgaccagaccaacgacaacaucaccgcccgccucgaccgcaucgacgagaagcucuccgagauccucggcaugcuccacacccucgucgucgccuccgccggccccaccuccgcccgcgacggcauccgcgacgccauggucggccuccgcgaggagaugaucgagaagauccgcaccgaggcccucaugaccaacgaccgccucgaggccauggcccgccuccgcaacgaggaguccgagaagauggccaaggacaccuccgacgaggucucccucaaccccaccuccgagaagcucaacaaccuccucgagggcaacgacuccgacaacgaccucucccucgaggacuucugaggacuagucccuguucccagagcccacuuuuuuuucuuuuuuugaaauaaaauagccugucuuucagaucuaaaaaaaaaaaaaaaaaaaaaaaaaaaaaaaaaaaaaaaaaaaaaaaaaaaaaaaaaaaaaaaaugcaucccccccccccccccccccccccccccccccaaaggcucuuuucagagccaccagaauu

SEQ ID NO: 20602 - RNA, 1021 nt, Artificial Sequence
  mRNA product Design a-2 comprising derived and/or modified sequence from HRSV(Memphis-37)__AIY60637.1__P (opt3)
gggagaguccgcucagccagguugcagaagcggcuuagcguguguccuaaucuucucucugcguguagguaggccugugccgcaaacaagcuuaccauggagaaguucgcccccgaauuucacggcgaggacgcuaacaauagagcaaccaaauuccuggaaagcaucaaggggaaauuuacauccccuaaggauccgaaaaagaaggacucuauuauaucagugaacaguaucgauauugaggucacuaaagaaagcccaaucacguccaauucuaccauuaucaaccccacaaaugagacugacgauaccgccggaaacaagccuaauuaccagaggaaaccacucguuucguucaaggaggaccccacaccuucagauaacccauuuagcaaacuuuauaaggaaaccauagagacuuucgacaauaacgaagaggagaguuccuacucuuaugaagagaucaaugaucaaacaaacgacaauauuaccgcgcggcuggaucgcaucgacgaaaaguugagcgagauuuuagguaugcugcauacgcuagugguagcuuccgccggccccacuucagcacgagaugggauccgugacgccauggugggacucagagaagagaugauagagaaaauuaggaccgaagcucugaugacaaacgaccggcuugaggcaauggcccgccugagaaaugaagagagugaaaagauggcuaaagauacuagcgacgaggucucuuugaacccuaccuccgagaagcucaacaaucugcuggaaggcaacgauucagacaaugaucucagcuuagaggacuuuugaggacuagucccuguucccagagcccacuuuuuuuucuuuuuuugaaauaaaauagccugucuuucagaucuaaaaaaaaaaaaaaaaaaaaaaaaaaaaaaaaaaaaaaaaaaaaaaaaaaaaaaaaaaaaaaaaugcaucccccccccccccccccccccccccccccccaaaggcucuuuucagagccaccagaauu

SEQ ID NO: 20603 - RNA, 1021 nt, Artificial Sequence
  mRNA product Design a-2 comprising derived and/or modified sequence from HRSV(Memphis-37)__AIY60637.1__P (opt4)
gggagaguccgcucagccagguugcagaagcggcuuagcguguguccuaaucuucucucugcguguagguaggccugugccgcaaacaagcuuaccauggagaaguucgcccccgaguuccacggcgaggacgccaacaacagagccaccaaguuccuggagagcaucaagggcaaguucaccagccccaaggaccccaagaagaaggacagcaucaucagcgugaacagcaucgacaucgaggugaccaaggagagccccaucaccagcaacagcaccaucaucaaccccaccaacgagaccgacgacaccgccggcaacaagcccaacuaccagagaaagccccuggugagcuucaaggaggaccccacccccagcgacaaccccuucagcaagcuguacaaggagaccaucgagaccuucgacaacaacgaggaggagagcagcuacagcuacgaggagaucaacgaccagaccaacgacaacaucaccgccagacuggacagaaucgacgagaagcugagcgagauccugggcaugcugcacacccuggugguggccagcgccggccccaccagcgccagagacggcaucagagacgccauggugggccugagagaggagaugaucgagaagaucagaaccgaggcccugaugaccaacgacagacuggaggccauggccagacugagaaacgaggagagcgagaagauggccaaggacaccagcgacgaggugagccugaaccccaccagcgagaagcugaacaaccugcuggagggcaacgacagcgacaacgaccugagccuggaggacuucugaggacuagucccuguucccagagcccacuuuuuuuucuuuuuuugaaauaaaauagccugucuuucagaucuaaaaaaaaaaaaaaaaaaaaaaaaaaaaaaaaaaaaaaaaaaaaaaaaaaaaaaaaaaaaaaaaugcaucccccccccccccccccccccccccccccccaaaggcucuuuucagagccaccagaauu

SEQ ID NO: 20604 - RNA, 1021 nt, Artificial Sequence
  mRNA product Design a-2 comprising derived and/or modified sequence from HRSV(Memphis-37)__AIY60637.1__P (opt5)
gggagaguccgcucagccagguugcagaagcggcuuagcguguguccuaaucuucucucugcguguagguaggccugugccgcaaacaagcuuaccauggagaaguucgcccccgaauuucacggcgaggacgcuaacaauagagccaccaaauuccuggaaagcaucaaggggaaauuuacauccccuaaggauccgaaaaagaaggacucuauuaucagcgugaacuccauugauaucgaggucacgaaagaaucucccauuaccagcaauuccacaaucaucaacccuaccaaugagacagacgauaccgcgggaaacaagcccaauuaccagcggaaaccucucguuucuuucaaggaggaccccacaccuagcgauaacccguuuuccaaacuguauaaggaaaccauugagacguucgacaauaacgaagaggagagcucuuacuccuaugaagagaucaaugaucaaaccaacgacaauauuacagcucgccuugauagaaucgacgaaaagcugagcgagauucucggcaugcugcauacccuugugguggccucugccgggcccacauccgcucgggauggaauccgcgacgccauggucggccugagagaagagaugauugagaaaauccggaccgaagcucucaugacgaacgaccgccuggaggccauggcgagacugcggaaugaagagagcgaaaagauggccaaagauacaucugacgaggugucccucaacccuaccagcgagaagcugaacaaucuucuggaagggaacgauuccgacaaugaucucucucuggaggacuuuugaggacuagucccuguucccagagcccacuuuuuuuucuuuuuuugaaauaaaauagccugucuuucagaucuaaaaaaaaaaaaaaaaaaaaaaaaaaaaaaaaaaaaaaaaaaaaaaaaaaaaaaaaaaaaaaaaugcaucccccccccccccccccccccccccccccccaaaggcucuuuucagagccaccagaauu

SEQ ID NO: 20605 - RNA, 1021 nt, Artificial Sequence
  mRNA product Design a-2 comprising derived and/or modified sequence from HRSV(Memphis-37)__AIY60637.1__P (opt6)
gggagaguccgcucagccagguugcagaagcggcuuagcguguguccuaaucuucucucugcguguagguaggccugugccgcaaacaagcuuaccauggaaaaauucgcaccagaauuccacggagaagacgcaaacaacagagcaacaaaauuccuagaaucaauaaaaggaaaauucacaagcccaaaagaucccaaaaaaaaagacucaaucauaagcguaaacucaauagauauagaaguaacaaaagaaaguccaauaacaagcaacaguacaauaauaaacccaacaaaugaaacagacgauacagcaggcaacaaaccaaacuaccaaagaaaaccgcuaguaaguuucaaagaagacccaacaccaagcgauaacccauuuucaaaauuauacaaagaaacaauagaaacauucgacaacaacgaagaagaaagcucauacucauacgaagaaauaaacgaccaaacaaacgacaacauaacagcgagauuagacagaauagacgaaaaacuaucagaaauacuaggcauguuacacacauuaguaguagcaagcgcaggaccaacaucagcaagagacggaauccgagacgcaaugguaggacuaagagaagaaaugauagaaaaaauaagaacagaagcacuaaugacaaacgacagacuagaagccauggcaagacuaagaaacgaagaaucagaaaaaauggcaaaagacacaucagacgaaguaucacuaaacccaacaagcgaaaaacuaaacaaccuauuagaaggaaacgacagcgacaacgaccuaucacucgaagacuucuaaggacuagucccuguucccagagcccacuuuuuuuucuuuuuuugaaauaaaauagccugucuuucagaucuaaaaaaaaaaaaaaaaaaaaaaaaaaaaaaaaaaaaaaaaaaaaaaaaaaaaaaaaaaaaaaaaugcaucccccccccccccccccccccccccccccccaaaggcucuuuucagagccaccagaauu

SEQ ID NO: 20606 - RNA, 1021 nt, Artificial Sequence
  mRNA product Design a-2 comprising derived and/or modified sequence from HRSV(Memphis-37)__AIY60637.1__P (opt11)
gggagaguccgcucagccagguugcagaagcggcuuagcguguguccuaaucuucucucugcguguagguaggccugugccgcaaacaagcuuaccauggaaaaauucgccccagaauuucacggcgaagacgccaacaaccgagccaccaaauuccucgaaucaauaaaaggcaaauucacaucccccaaagaccccaaaaaaaaagacucgaucaucuccgugaacucaaucgacauagaagucaccaaagaaagccccaucaccuccaacagcaccaucaucaaccccacaaacgaaacagacgacaccgccggcaacaaaccaaacuaccaacgaaaaccccucgucagcuucaaagaagaccccacaccaagcgacaaccccuucuccaaacucuacaaagaaacaauagaaaccuucgacaacaacgaagaagaaagcucguacucauacgaagaaaucaacgaccaaaccaacgacaacaucaccgcccgccucgaccgcaucgacgaaaaacucuccgaaauccucggaaugcuccacacacucgucgucgccagcgccggccccaccucagcccgggacggcauccgcgacgccauggugggccuccgcgaggaaaugaucgaaaaaauccgcacagaagcccucaugaccaacgaccgccucgaagccauggcccgccuccgcaacgaagaauccgaaaaaauggccaaagacaccuccgacgaagucucacuaaaccccaccuccgaaaaacuaaacaaccuccuagaaggcaacgacagcgacaacgaccucucccuagaagacuucuaaggacuagucccuguucccagagcccacuuuuuuuucuuuuuuugaaauaaaauagccugucuuucagaucuaaaaaaaaaaaaaaaaaaaaaaaaaaaaaaaaaaaaaaaaaaaaaaaaaaaaaaaaaaaaaaaaugcaucccccccccccccccccccccccccccccccaaaggcucuuuucagagccaccagaauu

SEQ ID NO: 20607 - RNA, 1099 nt, Artificial Sequence
  mRNA product Design a-3 comprising derived and/or modified sequence from HRSV(Memphis-37)__AIY60637.1__P (wt)
gggagagggcgcuuggcuugcaaggacccugagcugcggcauugaagcacacccaacccaacucgacugaagucagccucacugaaccggaucugagaaucuucucucucugggcuugccagggcucuccgaaccuagcuagcauccucuucaauuccaacuagaaagcuuaccauggaaaaguuugcuccugaauuccauggagaagacgcaaacaacagagccacuaaauuccuagaaucaauaaagggcaaauucacaucaccuaaagaucccaagaaaaaagauaguaucauaucugucaacucaauagauauagaaguaaccaaagaaagcccuauaacuucaaauucaaccauuauaaacccuacaaaugagacagaugauacugcagggaacaagcccaauuaucaaagaaaaccacuagugaguuucaaagaagacccuacgccaagugauaaucccuuuucaaaacuauacaaagaaaccauagaaacauuugauaacaaugaagaagaaucuagcuauucauaugaagaaauaaaugaucagacaaacgauaauauaacagcaagauuagauaggauugaugaaaaauuaagugaaauacuaggaaugcuucacacacuaguaguagcaagugcaggaccuacaucugcucgggaugguauaagagaugccaugguugguuuaagagaagaaaugauagaaaaaaucagaacugaagcauugaugaccaaugauagauuagaagcuauggcaagacucaggaaugaggaaagugaaaagauggcaaaagacacaucagaugaagugucucucaauccaacaucagagaaauugaacaaccuguuggaaggaaaugauagugauaaugaucuaucacuugaagauuucugaggacuagucccuguucccagagcccacuuuuuuuucuuuuuuugaaauaaaauagccugucuuucagaucuaaaaaaaaaaaaaaaaaaaaaaaaaaaaaaaaaaaaaaaaaaaaaaaaaaaaaaaaaaaaaaaaugcaucccccccccccccccccccccccccccccccaaaggcucuuuucagagccaccagaauu

SEQ ID NO: 20608 - RNA, 1099 nt, Artificial Sequence
  mRNA product Design a-3 comprising derived and/or modified sequence from HRSV(Memphis-37)__AIY60637.1__P (opt1)
gggagagggcgcuuggcuugcaaggacccugagcugcggcauugaagcacacccaacccaacucgacugaagucagccucacugaaccggaucugagaaucuucucucucugggcuugccagggcucuccgaaccuagcuagcauccucuucaauuccaacuagaaagcuuaccauggagaaguucgcccccgaguuccacggcgaggacgccaacaaccgcgcgaccaaguuccuggagagcaucaaggggaaguucaccuccccgaaggaccccaagaagaaggacagcaucaucuccgugaacagcaucgacaucgaggucacgaaggagucccccaucaccagcaacuccaccaucaucaaccccaccaacgagacggacgacaccgccggcaacaagccgaacuaccagcggaagccccucgugagcuucaaggaggaccccacccccuccgacaacccguucagcaagcuguacaaggagaccaucgagacguucgacaacaacgaggaggaguccagcuacuccuacgaggagaucaacgaccagaccaacgacaacaucaccgcccgccuggaccggaucgacgagaagcucagcgagauccuggggaugcugcacacccucguggucgccuccgccggccccacgagcgcgcgcgacgggauccgggacgccauggugggccugcgcgaggagaugaucgagaagauccggaccgaggcccugaugaccaacgaccgccucgaggccauggcgcggcugcgcaacgaggaguccgagaagauggccaaggacaccagcgacgaggugucccugaaccccacgagcgagaagcucaacaaccugcuggagggcaacgacagcgacaacgaccucucccuggaggacuucugaggacuagucccuguucccagagcccacuuuuuuuucuuuuuuugaaauaaaauagccugucuuucagaucuaaaaaaaaaaaaaaaaaaaaaaaaaaaaaaaaaaaaaaaaaaaaaaaaaaaaaaaaaaaaaaaaugcaucccccccccccccccccccccccccccccccaaaggcucuuuucagagccaccagaauu

SEQ ID NO: 20609 - RNA, 1099 nt, Artificial Sequence
  mRNA product Design a-3 comprising derived and/or modified sequence from HRSV(Memphis-37)__AIY60637.1__P (opt2)
gggagagggcgcuuggcuugcaaggacccugagcugcggcauugaagcacacccaacccaacucgacugaagucagccucacugaaccggaucugagaaucuucucucucugggcuugccagggcucuccgaaccuagcuagcauccucuucaauuccaacuagaaagcuuaccauggagaaguucgcccccgaguuccacggcgaggacgccaacaaccgcgccaccaaguuccucgaguccaucaagggcaaguucaccucccccaaggaccccaagaagaaggacuccaucaucuccgucaacuccaucgacaucgaggucaccaaggagucccccaucaccuccaacuccaccaucaucaaccccaccaacgagaccgacgacaccgccggcaacaagcccaacuaccagcgcaagccccucgucuccuucaaggaggaccccacccccuccgacaaccccuucuccaagcucuacaaggagaccaucgagaccuucgacaacaacgaggaggaguccuccuacuccuacgaggagaucaacgaccagaccaacgacaacaucaccgcccgccucgaccgcaucgacgagaagcucuccgagauccucggcaugcuccacacccucgucgucgccuccgccggccccaccuccgcccgcgacggcauccgcgacgccauggucggccuccgcgaggagaugaucgagaagauccgcaccgaggcccucaugaccaacgaccgccucgaggccauggcccgccuccgcaacgaggaguccgagaagauggccaaggacaccuccgacgaggucucccucaaccccaccuccgagaagcucaacaaccuccucgagggcaacgacuccgacaacgaccucucccucgaggacuucugaggacuagucccuguucccagagcccacuuuuuuuucuuuuuuugaaauaaaauagccugucuuucagaucuaaaaaaaaaaaaaaaaaaaaaaaaaaaaaaaaaaaaaaaaaaaaaaaaaaaaaaaaaaaaaaaaugcaucccccccccccccccccccccccccccccccaaaggcucuuuucagagccaccagaauu

SEQ ID NO: 20610 - RNA, 1099 nt, Artificial Sequence
  mRNA product Design a-3 comprising derived and/or modified sequence from HRSV(Memphis-37)__AIY60637.1__P (opt3)
gggagagggcgcuuggcuugcaaggacccugagcugcggcauugaagcacacccaacccaacucgacugaagucagccucacugaaccggaucugagaaucuucucucucugggcuugccagggcucuccgaaccuagcuagcauccucuucaauuccaacuagaaagcuuaccauggagaaguucgcccccgaauuucacggcgaggacgcuaacaauagagcaaccaaauuccuggaaagcaucaaggggaaauuuacauccccuaaggauccgaaaaagaaggacucuauuauaucagugaacaguaucgauauugaggucacuaaagaaagcccaaucacguccaauucuaccauuaucaaccccacaaaugagacugacgauaccgccggaaacaagccuaauuaccagaggaaaccacucguuucguucaaggaggaccccacaccuucagauaacccauuuagcaaacuuuauaaggaaaccauagagacuuucgacaauaacgaagaggagaguuccuacucuuaugaagagaucaaugaucaaacaaacgacaauauuaccgcgcggcuggaucgcaucgacgaaaaguugagcgagauuuuagguaugcugcauacgcuagugguagcuuccgccggccccacuucagcacgagaugggauccgugacgccauggugggacucagagaagagaugauagagaaaauuaggaccgaagcucugaugacaaacgaccggcuugaggcaauggcccgccugagaaaugaagagagugaaaagauggcuaaagauacuagcgacgaggucucuuugaacccuaccuccgagaagcucaacaaucugcuggaaggcaacgauucagacaaugaucucagcuuagaggacuuuugaggacuagucccuguucccagagcccacuuuuuuuucuuuuuuugaaauaaaauagccugucuuucagaucuaaaaaaaaaaaaaaaaaaaaaaaaaaaaaaaaaaaaaaaaaaaaaaaaaaaaaaaaaaaaaaaaugcaucccccccccccccccccccccccccccccccaaaggcucuuuucagagccaccagaauu

SEQ ID NO: 20611 - RNA, 1099 nt, Artificial Sequence
  mRNA product Design a-3 comprising derived and/or modified sequence from HRSV(Memphis-37)__AIY60637.1__P (opt4)
gggagagggcgcuuggcuugcaaggacccugagcugcggcauugaagcacacccaacccaacucgacugaagucagccucacugaaccggaucugagaaucuucucucucugggcuugccagggcucuccgaaccuagcuagcauccucuucaauuccaacuagaaagcuuaccauggagaaguucgcccccgaguuccacggcgaggacgccaacaacagagccaccaaguuccuggagagcaucaagggcaaguucaccagccccaaggaccccaagaagaaggacagcaucaucagcgugaacagcaucgacaucgaggugaccaaggagagccccaucaccagcaacagcaccaucaucaaccccaccaacgagaccgacgacaccgccggcaacaagcccaacuaccagagaaagccccuggugagcuucaaggaggaccccacccccagcgacaaccccuucagcaagcuguacaaggagaccaucgagaccuucgacaacaacgaggaggagagcagcuacagcuacgaggagaucaacgaccagaccaacgacaacaucaccgccagacuggacagaaucgacgagaagcugagcgagauccugggcaugcugcacacccuggugguggccagcgccggccccaccagcgccagagacggcaucagagacgccauggugggccugagagaggagaugaucgagaagaucagaaccgaggcccugaugaccaacgacagacuggaggccauggccagacugagaaacgaggagagcgagaagauggccaaggacaccagcgacgaggugagccugaaccccaccagcgagaagcugaacaaccugcuggagggcaacgacagcgacaacgaccugagccuggaggacuucugaggacuagucccuguucccagagcccacuuuuuuuucuuuuuuugaaauaaaauagccugucuuucagaucuaaaaaaaaaaaaaaaaaaaaaaaaaaaaaaaaaaaaaaaaaaaaaaaaaaaaaaaaaaaaaaaaugcaucccccccccccccccccccccccccccccccaaaggcucuuuucagagccaccagaauu

SEQ ID NO: 20612 - RNA, 1099 nt, Artificial Sequence
  mRNA product Design a-3 comprising derived and/or modified sequence from HRSV(Memphis-37)__AIY60637.1__P (opt5)
gggagagggcgcuuggcuugcaaggacccugagcugcggcauugaagcacacccaacccaacucgacugaagucagccucacugaaccggaucugagaaucuucucucucugggcuugccagggcucuccgaaccuagcuagcauccucuucaauuccaacuagaaagcuuaccauggagaaguucgcccccgaauuucacggcgaggacgcuaacaauagagccaccaaauuccuggaaagcaucaaggggaaauuuacauccccuaaggauccgaaaaagaaggacucuauuaucagcgugaacuccauugauaucgaggucacgaaagaaucucccauuaccagcaauuccacaaucaucaacccuaccaaugagacagacgauaccgcgggaaacaagcccaauuaccagcggaaaccucucguuucuuucaaggaggaccccacaccuagcgauaacccguuuuccaaacuguauaaggaaaccauugagacguucgacaauaacgaagaggagagcucuuacuccuaugaagagaucaaugaucaaaccaacgacaauauuacagcucgccuugauagaaucgacgaaaagcugagcgagauucucggcaugcugcauacccuugugguggccucugccgggcccacauccgcucgggauggaauccgcgacgccauggucggccugagagaagagaugauugagaaaauccggaccgaagcucucaugacgaacgaccgccuggaggccauggcgagacugcggaaugaagagagcgaaaagauggccaaagauacaucugacgaggugucccucaacccuaccagcgagaagcugaacaaucuucuggaagggaacgauuccgacaaugaucucucucuggaggacuuuugaggacuagucccuguucccagagcccacuuuuuuuucuuuuuuugaaauaaaauagccugucuuucagaucuaaaaaaaaaaaaaaaaaaaaaaaaaaaaaaaaaaaaaaaaaaaaaaaaaaaaaaaaaaaaaaaaugcaucccccccccccccccccccccccccccccccaaaggcucuuuucagagccaccagaauu

SEQ ID NO: 20613 - RNA, 1099 nt, Artificial Sequence
  mRNA product Design a-3 comprising derived and/or modified sequence from HRSV(Memphis-37)__AIY60637.1__P (opt6)
gggagagggcgcuuggcuugcaaggacccugagcugcggcauugaagcacacccaacccaacucgacugaagucagccucacugaaccggaucugagaaucuucucucucugggcuugccagggcucuccgaaccuagcuagcauccucuucaauuccaacuagaaagcuuaccauggaaaaauucgcaccagaauuccacggagaagacgcaaacaacagagcaacaaaauuccuagaaucaauaaaaggaaaauucacaagcccaaaagaucccaaaaaaaaagacucaaucauaagcguaaacucaauagauauagaaguaacaaaagaaaguccaauaacaagcaacaguacaauaauaaacccaacaaaugaaacagacgauacagcaggcaacaaaccaaacuaccaaagaaaaccgcuaguaaguuucaaagaagacccaacaccaagcgauaacccauuuucaaaauuauacaaagaaacaauagaaacauucgacaacaacgaagaagaaagcucauacucauacgaagaaauaaacgaccaaacaaacgacaacauaacagcgagauuagacagaauagacgaaaaacuaucagaaauacuaggcauguuacacacauuaguaguagcaagcgcaggaccaacaucagcaagagacggaauccgagacgcaaugguaggacuaagagaagaaaugauagaaaaaauaagaacagaagcacuaaugacaaacgacagacuagaagccauggcaagacuaagaaacgaagaaucagaaaaaauggcaaaagacacaucagacgaaguaucacuaaacccaacaagcgaaaaacuaaacaaccuauuagaaggaaacgacagcgacaacgaccuaucacucgaagacuucuaaggacuagucccuguucccagagcccacuuuuuuuucuuuuuuugaaauaaaauagccugucuuucagaucuaaaaaaaaaaaaaaaaaaaaaaaaaaaaaaaaaaaaaaaaaaaaaaaaaaaaaaaaaaaaaaaaugcaucccccccccccccccccccccccccccccccaaaggcucuuuucagagccaccagaauu

SEQ ID NO: 20614 - RNA, 1099 nt, Artificial Sequence
  mRNA product Design a-3 comprising derived and/or modified sequence from HRSV(Memphis-37)__AIY60637.1__P (opt11)
gggagagggcgcuuggcuugcaaggacccugagcugcggcauugaagcacacccaacccaacucgacugaagucagccucacugaaccggaucugagaaucuucucucucugggcuugccagggcucuccgaaccuagcuagcauccucuucaauuccaacuagaaagcuuaccauggaaaaauucgccccagaauuucacggcgaagacgccaacaaccgagccaccaaauuccucgaaucaauaaaaggcaaauucacaucccccaaagaccccaaaaaaaaagacucgaucaucuccgugaacucaaucgacauagaagucaccaaagaaagccccaucaccuccaacagcaccaucaucaaccccacaaacgaaacagacgacaccgccggcaacaaaccaaacuaccaacgaaaaccccucgucagcuucaaagaagaccccacaccaagcgacaaccccuucuccaaacucuacaaagaaacaauagaaaccuucgacaacaacgaagaagaaagcucguacucauacgaagaaaucaacgaccaaaccaacgacaacaucaccgcccgccucgaccgcaucgacgaaaaacucuccgaaauccucggaaugcuccacacacucgucgucgccagcgccggccccaccucagcccgggacggcauccgcgacgccauggugggccuccgcgaggaaaugaucgaaaaaauccgcacagaagcccucaugaccaacgaccgccucgaagccauggcccgccuccgcaacgaagaauccgaaaaaauggccaaagacaccuccgacgaagucucacuaaaccccaccuccgaaaaacuaaacaaccuccuagaaggcaacgacagcgacaacgaccucucccuagaagacuucuaaggacuagucccuguucccagagcccacuuuuuuuucuuuuuuugaaauaaaauagccugucuuucagaucuaaaaaaaaaaaaaaaaaaaaaaaaaaaaaaaaaaaaaaaaaaaaaaaaaaaaaaaaaaaaaaaaugcaucccccccccccccccccccccccccccccccaaaggcucuuuucagagccaccagaauu

SEQ ID NO: 20615 - RNA, 1048 nt, Artificial Sequence
  mRNA product Design a-4 comprising derived and/or modified sequence from HRSV(Memphis-37)__AIY60637.1__P (wt)
gggagacuccugucgggcggaaguaggaggaguagaguuuaaaaacaguacucuuuuuccgguucgggacguaguugaagcaacgacaagccggauaaccgcucuugagacaggaagcuuaccauggaaaaguuugcuccugaauuccauggagaagacgcaaacaacagagccacuaaauuccuagaaucaauaaagggcaaauucacaucaccuaaagaucccaagaaaaaagauaguaucauaucugucaacucaauagauauagaaguaaccaaagaaagcccuauaacuucaaauucaaccauuauaaacccuacaaaugagacagaugauacugcagggaacaagcccaauuaucaaagaaaaccacuagugaguuucaaagaagacccuacgccaagugauaaucccuuuucaaaacuauacaaagaaaccauagaaacauuugauaacaaugaagaagaaucuagcuauucauaugaagaaauaaaugaucagacaaacgauaauauaacagcaagauuagauaggauugaugaaaaauuaagugaaauacuaggaaugcuucacacacuaguaguagcaagugcaggaccuacaucugcucgggaugguauaagagaugccaugguugguuuaagagaagaaaugauagaaaaaaucagaacugaagcauugaugaccaaugauagauuagaagcuauggcaagacucaggaaugaggaaagugaaaagauggcaaaagacacaucagaugaagugucucucaauccaacaucagagaaauugaacaaccuguuggaaggaaaugauagugauaaugaucuaucacuugaagauuucugaggacuagucccuguucccagagcccacuuuuuuuucuuuuuuugaaauaaaauagccugucuuucagaucuaaaaaaaaaaaaaaaaaaaaaaaaaaaaaaaaaaaaaaaaaaaaaaaaaaaaaaaaaaaaaaaaugcaucccccccccccccccccccccccccccccccaaaggcucuuuucagagccaccagaauu

SEQ ID NO: 20616 - RNA, 1048 nt, Artificial Sequence
  mRNA product Design a-4 comprising derived and/or modified sequence from HRSV(Memphis-37)__AIY60637.1__P (opt1)
gggagacuccugucgggcggaaguaggaggaguagaguuuaaaaacaguacucuuuuuccgguucgggacguaguugaagcaacgacaagccggauaaccgcucuugagacaggaagcuuaccauggagaaguucgcccccgaguuccacggcgaggacgccaacaaccgcgcgaccaaguuccuggagagcaucaaggggaaguucaccuccccgaaggaccccaagaagaaggacagcaucaucuccgugaacagcaucgacaucgaggucacgaaggagucccccaucaccagcaacuccaccaucaucaaccccaccaacgagacggacgacaccgccggcaacaagccgaacuaccagcggaagccccucgugagcuucaaggaggaccccacccccuccgacaacccguucagcaagcuguacaaggagaccaucgagacguucgacaacaacgaggaggaguccagcuacuccuacgaggagaucaacgaccagaccaacgacaacaucaccgcccgccuggaccggaucgacgagaagcucagcgagauccuggggaugcugcacacccucguggucgccuccgccggccccacgagcgcgcgcgacgggauccgggacgccauggugggccugcgcgaggagaugaucgagaagauccggaccgaggcccugaugaccaacgaccgccucgaggccauggcgcggcugcgcaacgaggaguccgagaagauggccaaggacaccagcgacgaggugucccugaaccccacgagcgagaagcucaacaaccugcuggagggcaacgacagcgacaacgaccucucccuggaggacuucugaggacuagucccuguucccagagcccacuuuuuuuucuuuuuuugaaauaaaauagccugucuuucagaucuaaaaaaaaaaaaaaaaaaaaaaaaaaaaaaaaaaaaaaaaaaaaaaaaaaaaaaaaaaaaaaaaugcaucccccccccccccccccccccccccccccccaaaggcucuuuucagagccaccagaauu

SEQ ID NO: 20617 - RNA, 1048 nt, Artificial Sequence
  mRNA product Design a-4 comprising derived and/or modified sequence from HRSV(Memphis-37)__AIY60637.1__P (opt2)
gggagacuccugucgggcggaaguaggaggaguagaguuuaaaaacaguacucuuuuuccgguucgggacguaguugaagcaacgacaagccggauaaccgcucuugagacaggaagcuuaccauggagaaguucgcccccgaguuccacggcgaggacgccaacaaccgcgccaccaaguuccucgaguccaucaagggcaaguucaccucccccaaggaccccaagaagaaggacuccaucaucuccgucaacuccaucgacaucgaggucaccaaggagucccccaucaccuccaacuccaccaucaucaaccccaccaacgagaccgacgacaccgccggcaacaagcccaacuaccagcgcaagccccucgucuccuucaaggaggaccccacccccuccgacaaccccuucuccaagcucuacaaggagaccaucgagaccuucgacaacaacgaggaggaguccuccuacuccuacgaggagaucaacgaccagaccaacgacaacaucaccgcccgccucgaccgcaucgacgagaagcucuccgagauccucggcaugcuccacacccucgucgucgccuccgccggccccaccuccgcccgcgacggcauccgcgacgccauggucggccuccgcgaggagaugaucgagaagauccgcaccgaggcccucaugaccaacgaccgccucgaggccauggcccgccuccgcaacgaggaguccgagaagauggccaaggacaccuccgacgaggucucccucaaccccaccuccgagaagcucaacaaccuccucgagggcaacgacuccgacaacgaccucucccucgaggacuucugaggacuagucccuguucccagagcccacuuuuuuuucuuuuuuugaaauaaaauagccugucuuucagaucuaaaaaaaaaaaaaaaaaaaaaaaaaaaaaaaaaaaaaaaaaaaaaaaaaaaaaaaaaaaaaaaaugcaucccccccccccccccccccccccccccccccaaaggcucuuuucagagccaccagaauu

SEQ ID NO: 20618 - RNA, 1048 nt, Artificial Sequence
  mRNA product Design a-4 comprising derived and/or modified sequence from HRSV(Memphis-37)__AIY60637.1__P (opt3)
gggagacuccugucgggcggaaguaggaggaguagaguuuaaaaacaguacucuuuuuccgguucgggacguaguugaagcaacgacaagccggauaaccgcucuugagacaggaagcuuaccauggagaaguucgcccccgaauuucacggcgaggacgcuaacaauagagcaaccaaauuccuggaaagcaucaaggggaaauuuacauccccuaaggauccgaaaaagaaggacucuauuauaucagugaacaguaucgauauugaggucacuaaagaaagcccaaucacguccaauucuaccauuaucaaccccacaaaugagacugacgauaccgccggaaacaagccuaauuaccagaggaaaccacucguuucguucaaggaggaccccacaccuucagauaacccauuuagcaaacuuuauaaggaaaccauagagacuuucgacaauaacgaagaggagaguuccuacucuuaugaagagaucaaugaucaaacaaacgacaauauuaccgcgcggcuggaucgcaucgacgaaaaguugagcgagauuuuagguaugcugcauacgcuagugguagcuuccgccggccccacuucagcacgagaugggauccgugacgccauggugggacucagagaagagaugauagagaaaauuaggaccgaagcucugaugacaaacgaccggcuugaggcaauggcccgccugagaaaugaagagagugaaaagauggcuaaagauacuagcgacgaggucucuuugaacccuaccuccgagaagcucaacaaucugcuggaaggcaacgauucagacaaugaucucagcuuagaggacuuuugaggacuagucccuguucccagagcccacuuuuuuuucuuuuuuugaaauaaaauagccugucuuucagaucuaaaaaaaaaaaaaaaaaaaaaaaaaaaaaaaaaaaaaaaaaaaaaaaaaaaaaaaaaaaaaaaaugcaucccccccccccccccccccccccccccccccaaaggcucuuuucagagccaccagaauu

SEQ ID NO: 20619 - RNA, 1048 nt, Artificial Sequence
  mRNA product Design a-4 comprising derived and/or modified sequence from HRSV(Memphis-37)__AIY60637.1__P (opt4)
gggagacuccugucgggcggaaguaggaggaguagaguuuaaaaacaguacucuuuuuccgguucgggacguaguugaagcaacgacaagccggauaaccgcucuugagacaggaagcuuaccauggagaaguucgcccccgaguuccacggcgaggacgccaacaacagagccaccaaguuccuggagagcaucaagggcaaguucaccagccccaaggaccccaagaagaaggacagcaucaucagcgugaacagcaucgacaucgaggugaccaaggagagccccaucaccagcaacagcaccaucaucaaccccaccaacgagaccgacgacaccgccggcaacaagcccaacuaccagagaaagccccuggugagcuucaaggaggaccccacccccagcgacaaccccuucagcaagcuguacaaggagaccaucgagaccuucgacaacaacgaggaggagagcagcuacagcuacgaggagaucaacgaccagaccaacgacaacaucaccgccagacuggacagaaucgacgagaagcugagcgagauccugggcaugcugcacacccuggugguggccagcgccggccccaccagcgccagagacggcaucagagacgccauggugggccugagagaggagaugaucgagaagaucagaaccgaggcccugaugaccaacgacagacuggaggccauggccagacugagaaacgaggagagcgagaagauggccaaggacaccagcgacgaggugagccugaaccccaccagcgagaagcugaacaaccugcuggagggcaacgacagcgacaacgaccugagccuggaggacuucugaggacuagucccuguucccagagcccacuuuuuuuucuuuuuuugaaauaaaauagccugucuuucagaucuaaaaaaaaaaaaaaaaaaaaaaaaaaaaaaaaaaaaaaaaaaaaaaaaaaaaaaaaaaaaaaaaugcaucccccccccccccccccccccccccccccccaaaggcucuuuucagagccaccagaauu

SEQ ID NO: 20620 - RNA, 1048 nt, Artificial Sequence
  mRNA product Design a-4 comprising derived and/or modified sequence from HRSV(Memphis-37)__AIY60637.1__P (opt5)
gggagacuccugucgggcggaaguaggaggaguagaguuuaaaaacaguacucuuuuuccgguucgggacguaguugaagcaacgacaagccggauaaccgcucuugagacaggaagcuuaccauggagaaguucgcccccgaauuucacggcgaggacgcuaacaauagagccaccaaauuccuggaaagcaucaaggggaaauuuacauccccuaaggauccgaaaaagaaggacucuauuaucagcgugaacuccauugauaucgaggucacgaaagaaucucccauuaccagcaauuccacaaucaucaacccuaccaaugagacagacgauaccgcgggaaacaagcccaauuaccagcggaaaccucucguuucuuucaaggaggaccccacaccuagcgauaacccguuuuccaaacuguauaaggaaaccauugagacguucgacaauaacgaagaggagagcucuuacuccuaugaagagaucaaugaucaaaccaacgacaauauuacagcucgccuugauagaaucgacgaaaagcugagcgagauucucggcaugcugcauacccuugugguggccucugccgggcccacauccgcucgggauggaauccgcgacgccauggucggccugagagaagagaugauugagaaaauccggaccgaagcucucaugacgaacgaccgccuggaggccauggcgagacugcggaaugaagagagcgaaaagauggccaaagauacaucugacgaggugucccucaacccuaccagcgagaagcugaacaaucuucuggaagggaacgauuccgacaaugaucucucucuggaggacuuuugaggacuagucccuguucccagagcccacuuuuuuuucuuuuuuugaaauaaaauagccugucuuucagaucuaaaaaaaaaaaaaaaaaaaaaaaaaaaaaaaaaaaaaaaaaaaaaaaaaaaaaaaaaaaaaaaaugcaucccccccccccccccccccccccccccccccaaaggcucuuuucagagccaccagaauu

SEQ ID NO: 20621 - RNA, 1048 nt, Artificial Sequence
  mRNA product Design a-4 comprising derived and/or modified sequence from HRSV(Memphis-37)__AIY60637.1__P (opt6)
gggagacuccugucgggcggaaguaggaggaguagaguuuaaaaacaguacucuuuuuccgguucgggacguaguugaagcaacgacaagccggauaaccgcucuugagacaggaagcuuaccauggaaaaauucgcaccagaauuccacggagaagacgcaaacaacagagcaacaaaauuccuagaaucaauaaaaggaaaauucacaagcccaaaagaucccaaaaaaaaagacucaaucauaagcguaaacucaauagauauagaaguaacaaaagaaaguccaauaacaagcaacaguacaauaauaaacccaacaaaugaaacagacgauacagcaggcaacaaaccaaacuaccaaagaaaaccgcuaguaaguuucaaagaagacccaacaccaagcgauaacccauuuucaaaauuauacaaagaaacaauagaaacauucgacaacaacgaagaagaaagcucauacucauacgaagaaauaaacgaccaaacaaacgacaacauaacagcgagauuagacagaauagacgaaaaacuaucagaaauacuaggcauguuacacacauuaguaguagcaagcgcaggaccaacaucagcaagagacggaauccgagacgcaaugguaggacuaagagaagaaaugauagaaaaaauaagaacagaagcacuaaugacaaacgacagacuagaagccauggcaagacuaagaaacgaagaaucagaaaaaauggcaaaagacacaucagacgaaguaucacuaaacccaacaagcgaaaaacuaaacaaccuauuagaaggaaacgacagcgacaacgaccuaucacucgaagacuucuaaggacuagucccuguucccagagcccacuuuuuuuucuuuuuuugaaauaaaauagccugucuuucagaucuaaaaaaaaaaaaaaaaaaaaaaaaaaaaaaaaaaaaaaaaaaaaaaaaaaaaaaaaaaaaaaaaugcaucccccccccccccccccccccccccccccccaaaggcucuuuucagagccaccagaauu

SEQ ID NO: 20622 - RNA, 1048 nt, Artificial Sequence
  mRNA product Design a-4 comprising derived and/or modified sequence from HRSV(Memphis-37)__AIY60637.1__P (opt11)
gggagacuccugucgggcggaaguaggaggaguagaguuuaaaaacaguacucuuuuuccgguucgggacguaguugaagcaacgacaagccggauaaccgcucuugagacaggaagcuuaccauggaaaaauucgccccagaauuucacggcgaagacgccaacaaccgagccaccaaauuccucgaaucaauaaaaggcaaauucacaucccccaaagaccccaaaaaaaaagacucgaucaucuccgugaacucaaucgacauagaagucaccaaagaaagccccaucaccuccaacagcaccaucaucaaccccacaaacgaaacagacgacaccgccggcaacaaaccaaacuaccaacgaaaaccccucgucagcuucaaagaagaccccacaccaagcgacaaccccuucuccaaacucuacaaagaaacaauagaaaccuucgacaacaacgaagaagaaagcucguacucauacgaagaaaucaacgaccaaaccaacgacaacaucaccgcccgccucgaccgcaucgacgaaaaacucuccgaaauccucggaaugcuccacacacucgucgucgccagcgccggccccaccucagcccgggacggcauccgcgacgccauggugggccuccgcgaggaaaugaucgaaaaaauccgcacagaagcccucaugaccaacgaccgccucgaagccauggcccgccuccgcaacgaagaauccgaaaaaauggccaaagacaccuccgacgaagucucacuaaaccccaccuccgaaaaacuaaacaaccuccuagaaggcaacgacagcgacaacgaccucucccuagaagacuucuaaggacuagucccuguucccagagcccacuuuuuuuucuuuuuuugaaauaaaauagccugucuuucagaucuaaaaaaaaaaaaaaaaaaaaaaaaaaaaaaaaaaaaaaaaaaaaaaaaaaaaaaaaaaaaaaaaugcaucccccccccccccccccccccccccccccccaaaggcucuuuucagagccaccagaauu

SEQ ID NO: 20623 - RNA, 994 nt, Artificial Sequence
  mRNA product Design a-5 comprising derived and/or modified sequence from HRSV(Memphis-37)__AIY60637.1__P (wt)
gggagacuuucccauucuguagcagaauuugguguugccuguggucuuggucccgcggagaagcuuaccauggaaaaguuugcuccugaauuccauggagaagacgcaaacaacagagccacuaaauuccuagaaucaauaaagggcaaauucacaucaccuaaagaucccaagaaaaaagauaguaucauaucugucaacucaauagauauagaaguaaccaaagaaagcccuauaacuucaaauucaaccauuauaaacccuacaaaugagacagaugauacugcagggaacaagcccaauuaucaaagaaaaccacuagugaguuucaaagaagacccuacgccaagugauaaucccuuuucaaaacuauacaaagaaaccauagaaacauuugauaacaaugaagaagaaucuagcuauucauaugaagaaauaaaugaucagacaaacgauaauauaacagcaagauuagauaggauugaugaaaaauuaagugaaauacuaggaaugcuucacacacuaguaguagcaagugcaggaccuacaucugcucgggaugguauaagagaugccaugguugguuuaagagaagaaaugauagaaaaaaucagaacugaagcauugaugaccaaugauagauuagaagcuauggcaagacucaggaaugaggaaagugaaaagauggcaaaagacacaucagaugaagugucucucaauccaacaucagagaaauugaacaaccuguuggaaggaaaugauagugauaaugaucuaucacuugaagauuucugaggacuagucccuguucccagagcccacuuuuuuuucuuuuuuugaaauaaaauagccugucuuucagaucuaaaaaaaaaaaaaaaaaaaaaaaaaaaaaaaaaaaaaaaaaaaaaaaaaaaaaaaaaaaaaaaaugcaucccccccccccccccccccccccccccccccaaaggcucuuuucagagccaccagaauu

SEQ ID NO: 20624 - RNA, 994 nt, Artificial Sequence
  mRNA product Design a-5 comprising derived and/or modified sequence from HRSV(Memphis-37)__AIY60637.1__P (opt1)
gggagacuuucccauucuguagcagaauuugguguugccuguggucuuggucccgcggagaagcuuaccauggagaaguucgcccccgaguuccacggcgaggacgccaacaaccgcgcgaccaaguuccuggagagcaucaaggggaaguucaccuccccgaaggaccccaagaagaaggacagcaucaucuccgugaacagcaucgacaucgaggucacgaaggagucccccaucaccagcaacuccaccaucaucaaccccaccaacgagacggacgacaccgccggcaacaagccgaacuaccagcggaagccccucgugagcuucaaggaggaccccacccccuccgacaacccguucagcaagcuguacaaggagaccaucgagacguucgacaacaacgaggaggaguccagcuacuccuacgaggagaucaacgaccagaccaacgacaacaucaccgcccgccuggaccggaucgacgagaagcucagcgagauccuggggaugcugcacacccucguggucgccuccgccggccccacgagcgcgcgcgacgggauccgggacgccauggugggccugcgcgaggagaugaucgagaagauccggaccgaggcccugaugaccaacgaccgccucgaggccauggcgcggcugcgcaacgaggaguccgagaagauggccaaggacaccagcgacgaggugucccugaaccccacgagcgagaagcucaacaaccugcuggagggcaacgacagcgacaacgaccucucccuggaggacuucugaggacuagucccuguucccagagcccacuuuuuuuucuuuuuuugaaauaaaauagccugucuuucagaucuaaaaaaaaaaaaaaaaaaaaaaaaaaaaaaaaaaaaaaaaaaaaaaaaaaaaaaaaaaaaaaaaugcaucccccccccccccccccccccccccccccccaaaggcucuuuucagagccaccagaauu

SEQ ID NO: 20625 - RNA, 994 nt, Artificial Sequence
  mRNA product Design a-5 comprising derived and/or modified sequence from HRSV(Memphis-37)__AIY60637.1__P (opt2)
gggagacuuucccauucuguagcagaauuugguguugccuguggucuuggucccgcggagaagcuuaccauggagaaguucgcccccgaguuccacggcgaggacgccaacaaccgcgccaccaaguuccucgaguccaucaagggcaaguucaccucccccaaggaccccaagaagaaggacuccaucaucuccgucaacuccaucgacaucgaggucaccaaggagucccccaucaccuccaacuccaccaucaucaaccccaccaacgagaccgacgacaccgccggcaacaagcccaacuaccagcgcaagccccucgucuccuucaaggaggaccccacccccuccgacaaccccuucuccaagcucuacaaggagaccaucgagaccuucgacaacaacgaggaggaguccuccuacuccuacgaggagaucaacgaccagaccaacgacaacaucaccgcccgccucgaccgcaucgacgagaagcucuccgagauccucggcaugcuccacacccucgucgucgccuccgccggccccaccuccgcccgcgacggcauccgcgacgccauggucggccuccgcgaggagaugaucgagaagauccgcaccgaggcccucaugaccaacgaccgccucgaggccauggcccgccuccgcaacgaggaguccgagaagauggccaaggacaccuccgacgaggucucccucaaccccaccuccgagaagcucaacaaccuccucgagggcaacgacuccgacaacgaccucucccucgaggacuucugaggacuagucccuguucccagagcccacuuuuuuuucuuuuuuugaaauaaaauagccugucuuucagaucuaaaaaaaaaaaaaaaaaaaaaaaaaaaaaaaaaaaaaaaaaaaaaaaaaaaaaaaaaaaaaaaaugcaucccccccccccccccccccccccccccccccaaaggcucuuuucagagccaccagaauu

SEQ ID NO: 20626 - RNA, 994 nt, Artificial Sequence
  mRNA product Design a-5 comprising derived and/or modified sequence from HRSV(Memphis-37)__AIY60637.1__P (opt3)
gggagacuuucccauucuguagcagaauuugguguugccuguggucuuggucccgcggagaagcuuaccauggagaaguucgcccccgaauuucacggcgaggacgcuaacaauagagcaaccaaauuccuggaaagcaucaaggggaaauuuacauccccuaaggauccgaaaaagaaggacucuauuauaucagugaacaguaucgauauugaggucacuaaagaaagcccaaucacguccaauucuaccauuaucaaccccacaaaugagacugacgauaccgccggaaacaagccuaauuaccagaggaaaccacucguuucguucaaggaggaccccacaccuucagauaacccauuuagcaaacuuuauaaggaaaccauagagacuuucgacaauaacgaagaggagaguuccuacucuuaugaagagaucaaugaucaaacaaacgacaauauuaccgcgcggcuggaucgcaucgacgaaaaguugagcgagauuuuagguaugcugcauacgcuagugguagcuuccgccggccccacuucagcacgagaugggauccgugacgccauggugggacucagagaagagaugauagagaaaauuaggaccgaagcucugaugacaaacgaccggcuugaggcaauggcccgccugagaaaugaagagagugaaaagauggcuaaagauacuagcgacgaggucucuuugaacccuaccuccgagaagcucaacaaucugcuggaaggcaacgauucagacaaugaucucagcuuagaggacuuuugaggacuagucccuguucccagagcccacuuuuuuuucuuuuuuugaaauaaaauagccugucuuucagaucuaaaaaaaaaaaaaaaaaaaaaaaaaaaaaaaaaaaaaaaaaaaaaaaaaaaaaaaaaaaaaaaaugcaucccccccccccccccccccccccccccccccaaaggcucuuuucagagccaccagaauu

SEQ ID NO: 20627 - RNA, 994 nt, Artificial Sequence
  mRNA product Design a-5 comprising derived and/or modified sequence from HRSV(Memphis-37)__AIY60637.1__P (opt4)
gggagacuuucccauucuguagcagaauuugguguugccuguggucuuggucccgcggagaagcuuaccauggagaaguucgcccccgaguuccacggcgaggacgccaacaacagagccaccaaguuccuggagagcaucaagggcaaguucaccagccccaaggaccccaagaagaaggacagcaucaucagcgugaacagcaucgacaucgaggugaccaaggagagccccaucaccagcaacagcaccaucaucaaccccaccaacgagaccgacgacaccgccggcaacaagcccaacuaccagagaaagccccuggugagcuucaaggaggaccccacccccagcgacaaccccuucagcaagcuguacaaggagaccaucgagaccuucgacaacaacgaggaggagagcagcuacagcuacgaggagaucaacgaccagaccaacgacaacaucaccgccagacuggacagaaucgacgagaagcugagcgagauccugggcaugcugcacacccuggugguggccagcgccggccccaccagcgccagagacggcaucagagacgccauggugggccugagagaggagaugaucgagaagaucagaaccgaggcccugaugaccaacgacagacuggaggccauggccagacugagaaacgaggagagcgagaagauggccaaggacaccagcgacgaggugagccugaaccccaccagcgagaagcugaacaaccugcuggagggcaacgacagcgacaacgaccugagccuggaggacuucugaggacuagucccuguucccagagcccacuuuuuuuucuuuuuuugaaauaaaauagccugucuuucagaucuaaaaaaaaaaaaaaaaaaaaaaaaaaaaaaaaaaaaaaaaaaaaaaaaaaaaaaaaaaaaaaaaugcaucccccccccccccccccccccccccccccccaaaggcucuuuucagagccaccagaauu

SEQ ID NO: 20628 - RNA, 994 nt, Artificial Sequence
  mRNA product Design a-5 comprising derived and/or modified sequence from HRSV(Memphis-37)__AIY60637.1__P (opt5)
gggagacuuucccauucuguagcagaauuugguguugccuguggucuuggucccgcggagaagcuuaccauggagaaguucgcccccgaauuucacggcgaggacgcuaacaauagagccaccaaauuccuggaaagcaucaaggggaaauuuacauccccuaaggauccgaaaaagaaggacucuauuaucagcgugaacuccauugauaucgaggucacgaaagaaucucccauuaccagcaauuccacaaucaucaacccuaccaaugagacagacgauaccgcgggaaacaagcccaauuaccagcggaaaccucucguuucuuucaaggaggaccccacaccuagcgauaacccguuuuccaaacuguauaaggaaaccauugagacguucgacaauaacgaagaggagagcucuuacuccuaugaagagaucaaugaucaaaccaacgacaauauuacagcucgccuugauagaaucgacgaaaagcugagcgagauucucggcaugcugcauacccuugugguggccucugccgggcccacauccgcucgggauggaauccgcgacgccauggucggccugagagaagagaugauugagaaaauccggaccgaagcucucaugacgaacgaccgccuggaggccauggcgagacugcggaaugaagagagcgaaaagauggccaaagauacaucugacgaggugucccucaacccuaccagcgagaagcugaacaaucuucuggaagggaacgauuccgacaaugaucucucucuggaggacuuuugaggacuagucccuguucccagagcccacuuuuuuuucuuuuuuugaaauaaaauagccugucuuucagaucuaaaaaaaaaaaaaaaaaaaaaaaaaaaaaaaaaaaaaaaaaaaaaaaaaaaaaaaaaaaaaaaaugcaucccccccccccccccccccccccccccccccaaaggcucuuuucagagccaccagaauu

SEQ ID NO: 20629 - RNA, 994 nt, Artificial Sequence
  mRNA product Design a-5 comprising derived and/or modified sequence from HRSV(Memphis-37)__AIY60637.1__P (opt6)
gggagacuuucccauucuguagcagaauuugguguugccuguggucuuggucccgcggagaagcuuaccauggaaaaauucgcaccagaauuccacggagaagacgcaaacaacagagcaacaaaauuccuagaaucaauaaaaggaaaauucacaagcccaaaagaucccaaaaaaaaagacucaaucauaagcguaaacucaauagauauagaaguaacaaaagaaaguccaauaacaagcaacaguacaauaauaaacccaacaaaugaaacagacgauacagcaggcaacaaaccaaacuaccaaagaaaaccgcuaguaaguuucaaagaagacccaacaccaagcgauaacccauuuucaaaauuauacaaagaaacaauagaaacauucgacaacaacgaagaagaaagcucauacucauacgaagaaauaaacgaccaaacaaacgacaacauaacagcgagauuagacagaauagacgaaaaacuaucagaaauacuaggcauguuacacacauuaguaguagcaagcgcaggaccaacaucagcaagagacggaauccgagacgcaaugguaggacuaagagaagaaaugauagaaaaaauaagaacagaagcacuaaugacaaacgacagacuagaagccauggcaagacuaagaaacgaagaaucagaaaaaauggcaaaagacacaucagacgaaguaucacuaaacccaacaagcgaaaaacuaaacaaccuauuagaaggaaacgacagcgacaacgaccuaucacucgaagacuucuaaggacuagucccuguucccagagcccacuuuuuuuucuuuuuuugaaauaaaauagccugucuuucagaucuaaaaaaaaaaaaaaaaaaaaaaaaaaaaaaaaaaaaaaaaaaaaaaaaaaaaaaaaaaaaaaaaugcaucccccccccccccccccccccccccccccccaaaggcucuuuucagagccaccagaauu

SEQ ID NO: 20630 - RNA, 994 nt, Artificial Sequence
  mRNA product Design a-5 comprising derived and/or modified sequence from HRSV(Memphis-37)__AIY60637.1__P (opt11)
gggagacuuucccauucuguagcagaauuugguguugccuguggucuuggucccgcggagaagcuuaccauggaaaaauucgccccagaauuucacggcgaagacgccaacaaccgagccaccaaauuccucgaaucaauaaaaggcaaauucacaucccccaaagaccccaaaaaaaaagacucgaucaucuccgugaacucaaucgacauagaagucaccaaagaaagccccaucaccuccaacagcaccaucaucaaccccacaaacgaaacagacgacaccgccggcaacaaaccaaacuaccaacgaaaaccccucgucagcuucaaagaagaccccacaccaagcgacaaccccuucuccaaacucuacaaagaaacaauagaaaccuucgacaacaacgaagaagaaagcucguacucauacgaagaaaucaacgaccaaaccaacgacaacaucaccgcccgccucgaccgcaucgacgaaaaacucuccgaaauccucggaaugcuccacacacucgucgucgccagcgccggccccaccucagcccgggacggcauccgcgacgccauggugggccuccgcgaggaaaugaucgaaaaaauccgcacagaagcccucaugaccaacgaccgccucgaagccauggcccgccuccgcaacgaagaauccgaaaaaauggccaaagacaccuccgacgaagucucacuaaaccccaccuccgaaaaacuaaacaaccuccuagaaggcaacgacagcgacaacgaccucucccuagaagacuucuaaggacuagucccuguucccagagcccacuuuuuuuucuuuuuuugaaauaaaauagccugucuuucagaucuaaaaaaaaaaaaaaaaaaaaaaaaaaaaaaaaaaaaaaaaaaaaaaaaaaaaaaaaaaaaaaaaugcaucccccccccccccccccccccccccccccccaaaggcucuuuucagagccaccagaauu

SEQ ID NO: 20631 - RNA, 1175 nt, Artificial Sequence
  mRNA product Design b-1 comprising derived and/or modified sequence from HRSV(Memphis-37)__AIY60637.1__P (wt)
gggagacggagacggccugcaggaccugcucucucagcccucagccgaggccuacgccgagccgagugcgcagccgacgaccgggaggagccgcagccuucaacucugagguacugugauccgcgcugcccgccgggccgccccaguccgcugcugcggcaccuccuucccucgcgcccucuucgcucgccagcgccuucccugugagccugcgucaccgcggccgccaagcuuaccauggaaaaguuugcuccugaauuccauggagaagacgcaaacaacagagccacuaaauuccuagaaucaauaaagggcaaauucacaucaccuaaagaucccaagaaaaaagauaguaucauaucugucaacucaauagauauagaaguaaccaaagaaagcccuauaacuucaaauucaaccauuauaaacccuacaaaugagacagaugauacugcagggaacaagcccaauuaucaaagaaaaccacuagugaguuucaaagaagacccuacgccaagugauaaucccuuuucaaaacuauacaaagaaaccauagaaacauuugauaacaaugaagaagaaucuagcuauucauaugaagaaauaaaugaucagacaaacgauaauauaacagcaagauuagauaggauugaugaaaaauuaagugaaauacuaggaaugcuucacacacuaguaguagcaagugcaggaccuacaucugcucgggaugguauaagagaugccaugguugguuuaagagaagaaaugauagaaaaaaucagaacugaagcauugaugaccaaugauagauuagaagcuauggcaagacucaggaaugaggaaagugaaaagauggcaaaagacacaucagaugaagugucucucaauccaacaucagagaaauugaacaaccuguuggaaggaaaugauagugauaaugaucuaucacuugaagauuucugaggacuaguguccaccugucccuccugggcugcuggauugucucguuuuccugccaaauaaacaggaucagcgcuuuacagaucuaaaaaaaaaaaaaaaaaaaaaaaaaaaaaaaaaaaaaaaaaaaaaaaaaaaaaaaaaaaaaaaaugcaucccccccccccccccccccccccccccccccaaaggcucuuuucagagccaccagaauu

SEQ ID NO: 20632 - RNA, 1175 nt, Artificial Sequence
  mRNA product Design b-1 comprising derived and/or modified sequence from HRSV(Memphis-37)__AIY60637.1__P (opt1)
gggagacggagacggccugcaggaccugcucucucagcccucagccgaggccuacgccgagccgagugcgcagccgacgaccgggaggagccgcagccuucaacucugagguacugugauccgcgcugcccgccgggccgccccaguccgcugcugcggcaccuccuucccucgcgcccucuucgcucgccagcgccuucccugugagccugcgucaccgcggccgccaagcuuaccauggagaaguucgcccccgaguuccacggcgaggacgccaacaaccgcgcgaccaaguuccuggagagcaucaaggggaaguucaccuccccgaaggaccccaagaagaaggacagcaucaucuccgugaacagcaucgacaucgaggucacgaaggagucccccaucaccagcaacuccaccaucaucaaccccaccaacgagacggacgacaccgccggcaacaagccgaacuaccagcggaagccccucgugagcuucaaggaggaccccacccccuccgacaacccguucagcaagcuguacaaggagaccaucgagacguucgacaacaacgaggaggaguccagcuacuccuacgaggagaucaacgaccagaccaacgacaacaucaccgcccgccuggaccggaucgacgagaagcucagcgagauccuggggaugcugcacacccucguggucgccuccgccggccccacgagcgcgcgcgacgggauccgggacgccauggugggccugcgcgaggagaugaucgagaagauccggaccgaggcccugaugaccaacgaccgccucgaggccauggcgcggcugcgcaacgaggaguccgagaagauggccaaggacaccagcgacgaggugucccugaaccccacgagcgagaagcucaacaaccugcuggagggcaacgacagcgacaacgaccucucccuggaggacuucugaggacuaguguccaccugucccuccugggcugcuggauugucucguuuuccugccaaauaaacaggaucagcgcuuuacagaucuaaaaaaaaaaaaaaaaaaaaaaaaaaaaaaaaaaaaaaaaaaaaaaaaaaaaaaaaaaaaaaaaugcaucccccccccccccccccccccccccccccccaaaggcucuuuucagagccaccagaauu

SEQ ID NO: 20633 - RNA, 1175 nt, Artificial Sequence
  mRNA product Design b-1 comprising derived and/or modified sequence from HRSV(Memphis-37)__AIY60637.1__P (opt2)
gggagacggagacggccugcaggaccugcucucucagcccucagccgaggccuacgccgagccgagugcgcagccgacgaccgggaggagccgcagccuucaacucugagguacugugauccgcgcugcccgccgggccgccccaguccgcugcugcggcaccuccuucccucgcgcccucuucgcucgccagcgccuucccugugagccugcgucaccgcggccgccaagcuuaccauggagaaguucgcccccgaguuccacggcgaggacgccaacaaccgcgccaccaaguuccucgaguccaucaagggcaaguucaccucccccaaggaccccaagaagaaggacuccaucaucuccgucaacuccaucgacaucgaggucaccaaggagucccccaucaccuccaacuccaccaucaucaaccccaccaacgagaccgacgacaccgccggcaacaagcccaacuaccagcgcaagccccucgucuccuucaaggaggaccccacccccuccgacaaccccuucuccaagcucuacaaggagaccaucgagaccuucgacaacaacgaggaggaguccuccuacuccuacgaggagaucaacgaccagaccaacgacaacaucaccgcccgccucgaccgcaucgacgagaagcucuccgagauccucggcaugcuccacacccucgucgucgccuccgccggccccaccuccgcccgcgacggcauccgcgacgccauggucggccuccgcgaggagaugaucgagaagauccgcaccgaggcccucaugaccaacgaccgccucgaggccauggcccgccuccgcaacgaggaguccgagaagauggccaaggacaccuccgacgaggucucccucaaccccaccuccgagaagcucaacaaccuccucgagggcaacgacuccgacaacgaccucucccucgaggacuucugaggacuaguguccaccugucccuccugggcugcuggauugucucguuuuccugccaaauaaacaggaucagcgcuuuacagaucuaaaaaaaaaaaaaaaaaaaaaaaaaaaaaaaaaaaaaaaaaaaaaaaaaaaaaaaaaaaaaaaaugcaucccccccccccccccccccccccccccccccaaaggcucuuuucagagccaccagaauu

SEQ ID NO: 20634 - RNA, 1175 nt, Artificial Sequence
  mRNA product Design b-1 comprising derived and/or modified sequence from HRSV(Memphis-37)__AIY60637.1__P (opt3)
gggagacggagacggccugcaggaccugcucucucagcccucagccgaggccuacgccgagccgagugcgcagccgacgaccgggaggagccgcagccuucaacucugagguacugugauccgcgcugcccgccgggccgccccaguccgcugcugcggcaccuccuucccucgcgcccucuucgcucgccagcgccuucccugugagccugcgucaccgcggccgccaagcuuaccauggagaaguucgcccccgaauuucacggcgaggacgcuaacaauagagcaaccaaauuccuggaaagcaucaaggggaaauuuacauccccuaaggauccgaaaaagaaggacucuauuauaucagugaacaguaucgauauugaggucacuaaagaaagcccaaucacguccaauucuaccauuaucaaccccacaaaugagacugacgauaccgccggaaacaagccuaauuaccagaggaaaccacucguuucguucaaggaggaccccacaccuucagauaacccauuuagcaaacuuuauaaggaaaccauagagacuuucgacaauaacgaagaggagaguuccuacucuuaugaagagaucaaugaucaaacaaacgacaauauuaccgcgcggcuggaucgcaucgacgaaaaguugagcgagauuuuagguaugcugcauacgcuagugguagcuuccgccggccccacuucagcacgagaugggauccgugacgccauggugggacucagagaagagaugauagagaaaauuaggaccgaagcucugaugacaaacgaccggcuugaggcaauggcccgccugagaaaugaagagagugaaaagauggcuaaagauacuagcgacgaggucucuuugaacccuaccuccgagaagcucaacaaucugcuggaaggcaacgauucagacaaugaucucagcuuagaggacuuuugaggacuaguguccaccugucccuccugggcugcuggauugucucguuuuccugccaaauaaacaggaucagcgcuuuacagaucuaaaaaaaaaaaaaaaaaaaaaaaaaaaaaaaaaaaaaaaaaaaaaaaaaaaaaaaaaaaaaaaaugcaucccccccccccccccccccccccccccccccaaaggcucuuuucagagccaccagaauu

SEQ ID NO: 20635 - RNA, 1175 nt, Artificial Sequence
  mRNA product Design b-1 comprising derived and/or modified sequence from HRSV(Memphis-37)__AIY60637.1__P (opt4)
gggagacggagacggccugcaggaccugcucucucagcccucagccgaggccuacgccgagccgagugcgcagccgacgaccgggaggagccgcagccuucaacucugagguacugugauccgcgcugcccgccgggccgccccaguccgcugcugcggcaccuccuucccucgcgcccucuucgcucgccagcgccuucccugugagccugcgucaccgcggccgccaagcuuaccauggagaaguucgcccccgaguuccacggcgaggacgccaacaacagagccaccaaguuccuggagagcaucaagggcaaguucaccagccccaaggaccccaagaagaaggacagcaucaucagcgugaacagcaucgacaucgaggugaccaaggagagccccaucaccagcaacagcaccaucaucaaccccaccaacgagaccgacgacaccgccggcaacaagcccaacuaccagagaaagccccuggugagcuucaaggaggaccccacccccagcgacaaccccuucagcaagcuguacaaggagaccaucgagaccuucgacaacaacgaggaggagagcagcuacagcuacgaggagaucaacgaccagaccaacgacaacaucaccgccagacuggacagaaucgacgagaagcugagcgagauccugggcaugcugcacacccuggugguggccagcgccggccccaccagcgccagagacggcaucagagacgccauggugggccugagagaggagaugaucgagaagaucagaaccgaggcccugaugaccaacgacagacuggaggccauggccagacugagaaacgaggagagcgagaagauggccaaggacaccagcgacgaggugagccugaaccccaccagcgagaagcugaacaaccugcuggagggcaacgacagcgacaacgaccugagccuggaggacuucugaggacuaguguccaccugucccuccugggcugcuggauugucucguuuuccugccaaauaaacaggaucagcgcuuuacagaucuaaaaaaaaaaaaaaaaaaaaaaaaaaaaaaaaaaaaaaaaaaaaaaaaaaaaaaaaaaaaaaaaugcaucccccccccccccccccccccccccccccccaaaggcucuuuucagagccaccagaauu

SEQ ID NO: 20636 - RNA, 1175 nt, Artificial Sequence
  mRNA product Design b-1 comprising derived and/or modified sequence from HRSV(Memphis-37)__AIY60637.1__P (opt5)
gggagacggagacggccugcaggaccugcucucucagcccucagccgaggccuacgccgagccgagugcgcagccgacgaccgggaggagccgcagccuucaacucugagguacugugauccgcgcugcccgccgggccgccccaguccgcugcugcggcaccuccuucccucgcgcccucuucgcucgccagcgccuucccugugagccugcgucaccgcggccgccaagcuuaccauggagaaguucgcccccgaauuucacggcgaggacgcuaacaauagagccaccaaauuccuggaaagcaucaaggggaaauuuacauccccuaaggauccgaaaaagaaggacucuauuaucagcgugaacuccauugauaucgaggucacgaaagaaucucccauuaccagcaauuccacaaucaucaacccuaccaaugagacagacgauaccgcgggaaacaagcccaauuaccagcggaaaccucucguuucuuucaaggaggaccccacaccuagcgauaacccguuuuccaaacuguauaaggaaaccauugagacguucgacaauaacgaagaggagagcucuuacuccuaugaagagaucaaugaucaaaccaacgacaauauuacagcucgccuugauagaaucgacgaaaagcugagcgagauucucggcaugcugcauacccuugugguggccucugccgggcccacauccgcucgggauggaauccgcgacgccauggucggccugagagaagagaugauugagaaaauccggaccgaagcucucaugacgaacgaccgccuggaggccauggcgagacugcggaaugaagagagcgaaaagauggccaaagauacaucugacgaggugucccucaacccuaccagcgagaagcugaacaaucuucuggaagggaacgauuccgacaaugaucucucucuggaggacuuuugaggacuaguguccaccugucccuccugggcugcuggauugucucguuuuccugccaaauaaacaggaucagcgcuuuacagaucuaaaaaaaaaaaaaaaaaaaaaaaaaaaaaaaaaaaaaaaaaaaaaaaaaaaaaaaaaaaaaaaaugcaucccccccccccccccccccccccccccccccaaaggcucuuuucagagccaccagaauu

SEQ ID NO: 20637 - RNA, 1175 nt, Artificial Sequence
  mRNA product Design b-1 comprising derived and/or modified sequence from HRSV(Memphis-37)__AIY60637.1__P (opt6)
gggagacggagacggccugcaggaccugcucucucagcccucagccgaggccuacgccgagccgagugcgcagccgacgaccgggaggagccgcagccuucaacucugagguacugugauccgcgcugcccgccgggccgccccaguccgcugcugcggcaccuccuucccucgcgcccucuucgcucgccagcgccuucccugugagccugcgucaccgcggccgccaagcuuaccauggaaaaauucgcaccagaauuccacggagaagacgcaaacaacagagcaacaaaauuccuagaaucaauaaaaggaaaauucacaagcccaaaagaucccaaaaaaaaagacucaaucauaagcguaaacucaauagauauagaaguaacaaaagaaaguccaauaacaagcaacaguacaauaauaaacccaacaaaugaaacagacgauacagcaggcaacaaaccaaacuaccaaagaaaaccgcuaguaaguuucaaagaagacccaacaccaagcgauaacccauuuucaaaauuauacaaagaaacaauagaaacauucgacaacaacgaagaagaaagcucauacucauacgaagaaauaaacgaccaaacaaacgacaacauaacagcgagauuagacagaauagacgaaaaacuaucagaaauacuaggcauguuacacacauuaguaguagcaagcgcaggaccaacaucagcaagagacggaauccgagacgcaaugguaggacuaagagaagaaaugauagaaaaaauaagaacagaagcacuaaugacaaacgacagacuagaagccauggcaagacuaagaaacgaagaaucagaaaaaauggcaaaagacacaucagacgaaguaucacuaaacccaacaagcgaaaaacuaaacaaccuauuagaaggaaacgacagcgacaacgaccuaucacucgaagacuucuaaggacuaguguccaccugucccuccugggcugcuggauugucucguuuuccugccaaauaaacaggaucagcgcuuuacagaucuaaaaaaaaaaaaaaaaaaaaaaaaaaaaaaaaaaaaaaaaaaaaaaaaaaaaaaaaaaaaaaaaugcaucccccccccccccccccccccccccccccccaaaggcucuuuucagagccaccagaauu

SEQ ID NO: 20638 - RNA, 1175 nt, Artificial Sequence
  mRNA product Design b-1 comprising derived and/or modified sequence from HRSV(Memphis-37)__AIY60637.1__P (opt11)
gggagacggagacggccugcaggaccugcucucucagcccucagccgaggccuacgccgagccgagugcgcagccgacgaccgggaggagccgcagccuucaacucugagguacugugauccgcgcugcccgccgggccgccccaguccgcugcugcggcaccuccuucccucgcgcccucuucgcucgccagcgccuucccugugagccugcgucaccgcggccgccaagcuuaccauggaaaaauucgccccagaauuucacggcgaagacgccaacaaccgagccaccaaauuccucgaaucaauaaaaggcaaauucacaucccccaaagaccccaaaaaaaaagacucgaucaucuccgugaacucaaucgacauagaagucaccaaagaaagccccaucaccuccaacagcaccaucaucaaccccacaaacgaaacagacgacaccgccggcaacaaaccaaacuaccaacgaaaaccccucgucagcuucaaagaagaccccacaccaagcgacaaccccuucuccaaacucuacaaagaaacaauagaaaccuucgacaacaacgaagaagaaagcucguacucauacgaagaaaucaacgaccaaaccaacgacaacaucaccgcccgccucgaccgcaucgacgaaaaacucuccgaaauccucggaaugcuccacacacucgucgucgccagcgccggccccaccucagcccgggacggcauccgcgacgccauggugggccuccgcgaggaaaugaucgaaaaaauccgcacagaagcccucaugaccaacgaccgccucgaagccauggcccgccuccgcaacgaagaauccgaaaaaauggccaaagacaccuccgacgaagucucacuaaaccccaccuccgaaaaacuaaacaaccuccuagaaggcaacgacagcgacaacgaccucucccuagaagacuucuaaggacuaguguccaccugucccuccugggcugcuggauugucucguuuuccugccaaauaaacaggaucagcgcuuuacagaucuaaaaaaaaaaaaaaaaaaaaaaaaaaaaaaaaaaaaaaaaaaaaaaaaaaaaaaaaaaaaaaaaugcaucccccccccccccccccccccccccccccccaaaggcucuuuucagagccaccagaauu

SEQ ID NO: 20639 - RNA, 995 nt, Artificial Sequence
  mRNA product Design b-2 comprising derived and/or modified sequence from HRSV(Memphis-37)__AIY60637.1__P (wt)
gggagagccucugcuggaguccggggaguggcguuggcugcuagagcgaagcuuaccauggaaaaguuugcuccugaauuccauggagaagacgcaaacaacagagccacuaaauuccuagaaucaauaaagggcaaauucacaucaccuaaagaucccaagaaaaaagauaguaucauaucugucaacucaauagauauagaaguaaccaaagaaagcccuauaacuucaaauucaaccauuauaaacccuacaaaugagacagaugauacugcagggaacaagcccaauuaucaaagaaaaccacuagugaguuucaaagaagacccuacgccaagugauaaucccuuuucaaaacuauacaaagaaaccauagaaacauuugauaacaaugaagaagaaucuagcuauucauaugaagaaauaaaugaucagacaaacgauaauauaacagcaagauuagauaggauugaugaaaaauuaagugaaauacuaggaaugcuucacacacuaguaguagcaagugcaggaccuacaucugcucgggaugguauaagagaugccaugguugguuuaagagaagaaaugauagaaaaaaucagaacugaagcauugaugaccaaugauagauuagaagcuauggcaagacucaggaaugaggaaagugaaaagauggcaaaagacacaucagaugaagugucucucaauccaacaucagagaaauugaacaaccuguuggaaggaaaugauagugauaaugaucuaucacuugaagauuucugaggacuaguguccaccugucccuccugggcugcuggauugucucguuuuccugccaaauaaacaggaucagcgcuuuacagaucuaaaaaaaaaaaaaaaaaaaaaaaaaaaaaaaaaaaaaaaaaaaaaaaaaaaaaaaaaaaaaaaaugcaucccccccccccccccccccccccccccccccaaaggcucuuuucagagccaccagaauu

SEQ ID NO: 20640 - RNA, 995 nt, Artificial Sequence
  mRNA product Design b-2 comprising derived and/or modified sequence from HRSV(Memphis-37)__AIY60637.1__P (opt1)
gggagagccucugcuggaguccggggaguggcguuggcugcuagagcgaagcuuaccauggagaaguucgcccccgaguuccacggcgaggacgccaacaaccgcgcgaccaaguuccuggagagcaucaaggggaaguucaccuccccgaaggaccccaagaagaaggacagcaucaucuccgugaacagcaucgacaucgaggucacgaaggagucccccaucaccagcaacuccaccaucaucaaccccaccaacgagacggacgacaccgccggcaacaagccgaacuaccagcggaagccccucgugagcuucaaggaggaccccacccccuccgacaacccguucagcaagcuguacaaggagaccaucgagacguucgacaacaacgaggaggaguccagcuacuccuacgaggagaucaacgaccagaccaacgacaacaucaccgcccgccuggaccggaucgacgagaagcucagcgagauccuggggaugcugcacacccucguggucgccuccgccggccccacgagcgcgcgcgacgggauccgggacgccauggugggccugcgcgaggagaugaucgagaagauccggaccgaggcccugaugaccaacgaccgccucgaggccauggcgcggcugcgcaacgaggaguccgagaagauggccaaggacaccagcgacgaggugucccugaaccccacgagcgagaagcucaacaaccugcuggagggcaacgacagcgacaacgaccucucccuggaggacuucugaggacuaguguccaccugucccuccugggcugcuggauugucucguuuuccugccaaauaaacaggaucagcgcuuuacagaucuaaaaaaaaaaaaaaaaaaaaaaaaaaaaaaaaaaaaaaaaaaaaaaaaaaaaaaaaaaaaaaaaugcaucccccccccccccccccccccccccccccccaaaggcucuuuucagagccaccagaauu

SEQ ID NO: 20641 - RNA, 995 nt, Artificial Sequence
  mRNA product Design b-2 comprising derived and/or modified sequence from HRSV(Memphis-37)__AIY60637.1__P (opt2)
gggagagccucugcuggaguccggggaguggcguuggcugcuagagcgaagcuuaccauggagaaguucgcccccgaguuccacggcgaggacgccaacaaccgcgccaccaaguuccucgaguccaucaagggcaaguucaccucccccaaggaccccaagaagaaggacuccaucaucuccgucaacuccaucgacaucgaggucaccaaggagucccccaucaccuccaacuccaccaucaucaaccccaccaacgagaccgacgacaccgccggcaacaagcccaacuaccagcgcaagccccucgucuccuucaaggaggaccccacccccuccgacaaccccuucuccaagcucuacaaggagaccaucgagaccuucgacaacaacgaggaggaguccuccuacuccuacgaggagaucaacgaccagaccaacgacaacaucaccgcccgccucgaccgcaucgacgagaagcucuccgagauccucggcaugcuccacacccucgucgucgccuccgccggccccaccuccgcccgcgacggcauccgcgacgccauggucggccuccgcgaggagaugaucgagaagauccgcaccgaggcccucaugaccaacgaccgccucgaggccauggcccgccuccgcaacgaggaguccgagaagauggccaaggacaccuccgacgaggucucccucaaccccaccuccgagaagcucaacaaccuccucgagggcaacgacuccgacaacgaccucucccucgaggacuucugaggacuaguguccaccugucccuccugggcugcuggauugucucguuuuccugccaaauaaacaggaucagcgcuuuacagaucuaaaaaaaaaaaaaaaaaaaaaaaaaaaaaaaaaaaaaaaaaaaaaaaaaaaaaaaaaaaaaaaaugcaucccccccccccccccccccccccccccccccaaaggcucuuuucagagccaccagaauu

SEQ ID NO: 20642 - RNA, 995 nt, Artificial Sequence
  mRNA product Design b-2 comprising derived and/or modified sequence from HRSV(Memphis-37)__AIY60637.1__P (opt3)
gggagagccucugcuggaguccggggaguggcguuggcugcuagagcgaagcuuaccauggagaaguucgcccccgaauuucacggcgaggacgcuaacaauagagcaaccaaauuccuggaaagcaucaaggggaaauuuacauccccuaaggauccgaaaaagaaggacucuauuauaucagugaacaguaucgauauugaggucacuaaagaaagcccaaucacguccaauucuaccauuaucaaccccacaaaugagacugacgauaccgccggaaacaagccuaauuaccagaggaaaccacucguuucguucaaggaggaccccacaccuucagauaacccauuuagcaaacuuuauaaggaaaccauagagacuuucgacaauaacgaagaggagaguuccuacucuuaugaagagaucaaugaucaaacaaacgacaauauuaccgcgcggcuggaucgcaucgacgaaaaguugagcgagauuuuagguaugcugcauacgcuagugguagcuuccgccggccccacuucagcacgagaugggauccgugacgccauggugggacucagagaagagaugauagagaaaauuaggaccgaagcucugaugacaaacgaccggcuugaggcaauggcccgccugagaaaugaagagagugaaaagauggcuaaagauacuagcgacgaggucucuuugaacccuaccuccgagaagcucaacaaucugcuggaaggcaacgauucagacaaugaucucagcuuagaggacuuuugaggacuaguguccaccugucccuccugggcugcuggauugucucguuuuccugccaaauaaacaggaucagcgcuuuacagaucuaaaaaaaaaaaaaaaaaaaaaaaaaaaaaaaaaaaaaaaaaaaaaaaaaaaaaaaaaaaaaaaaugcaucccccccccccccccccccccccccccccccaaaggcucuuuucagagccaccagaauu

SEQ ID NO: 20643 - RNA, 995 nt, Artificial Sequence
  mRNA product Design b-2 comprising derived and/or modified sequence from HRSV(Memphis-37)__AIY60637.1__P (opt4)
gggagagccucugcuggaguccggggaguggcguuggcugcuagagcgaagcuuaccauggagaaguucgcccccgaguuccacggcgaggacgccaacaacagagccaccaaguuccuggagagcaucaagggcaaguucaccagccccaaggaccccaagaagaaggacagcaucaucagcgugaacagcaucgacaucgaggugaccaaggagagccccaucaccagcaacagcaccaucaucaaccccaccaacgagaccgacgacaccgccggcaacaagcccaacuaccagagaaagccccuggugagcuucaaggaggaccccacccccagcgacaaccccuucagcaagcuguacaaggagaccaucgagaccuucgacaacaacgaggaggagagcagcuacagcuacgaggagaucaacgaccagaccaacgacaacaucaccgccagacuggacagaaucgacgagaagcugagcgagauccugggcaugcugcacacccuggugguggccagcgccggccccaccagcgccagagacggcaucagagacgccauggugggccugagagaggagaugaucgagaagaucagaaccgaggcccugaugaccaacgacagacuggaggccauggccagacugagaaacgaggagagcgagaagauggccaaggacaccagcgacgaggugagccugaaccccaccagcgagaagcugaacaaccugcuggagggcaacgacagcgacaacgaccugagccuggaggacuucugaggacuaguguccaccugucccuccugggcugcuggauugucucguuuuccugccaaauaaacaggaucagcgcuuuacagaucuaaaaaaaaaaaaaaaaaaaaaaaaaaaaaaaaaaaaaaaaaaaaaaaaaaaaaaaaaaaaaaaaugcaucccccccccccccccccccccccccccccccaaaggcucuuuucagagccaccagaauu

SEQ ID NO: 20644 - RNA, 995 nt, Artificial Sequence
  mRNA product Design b-2 comprising derived and/or modified sequence from HRSV(Memphis-37)__AIY60637.1__P (opt5)
gggagagccucugcuggaguccggggaguggcguuggcugcuagagcgaagcuuaccauggagaaguucgcccccgaauuucacggcgaggacgcuaacaauagagccaccaaauuccuggaaagcaucaaggggaaauuuacauccccuaaggauccgaaaaagaaggacucuauuaucagcgugaacuccauugauaucgaggucacgaaagaaucucccauuaccagcaauuccacaaucaucaacccuaccaaugagacagacgauaccgcgggaaacaagcccaauuaccagcggaaaccucucguuucuuucaaggaggaccccacaccuagcgauaacccguuuuccaaacuguauaaggaaaccauugagacguucgacaauaacgaagaggagagcucuuacuccuaugaagagaucaaugaucaaaccaacgacaauauuacagcucgccuugauagaaucgacgaaaagcugagcgagauucucggcaugcugcauacccuugugguggccucugccgggcccacauccgcucgggauggaauccgcgacgccauggucggccugagagaagagaugauugagaaaauccggaccgaagcucucaugacgaacgaccgccuggaggccauggcgagacugcggaaugaagagagcgaaaagauggccaaagauacaucugacgaggugucccucaacccuaccagcgagaagcugaacaaucuucuggaagggaacgauuccgacaaugaucucucucuggaggacuuuugaggacuaguguccaccugucccuccugggcugcuggauugucucguuuuccugccaaauaaacaggaucagcgcuuuacagaucuaaaaaaaaaaaaaaaaaaaaaaaaaaaaaaaaaaaaaaaaaaaaaaaaaaaaaaaaaaaaaaaaugcaucccccccccccccccccccccccccccccccaaaggcucuuuucagagccaccagaauu

SEQ ID NO: 20645 - RNA, 995 nt, Artificial Sequence
  mRNA product Design b-2 comprising derived and/or modified sequence from HRSV(Memphis-37)__AIY60637.1__P (opt6)
gggagagccucugcuggaguccggggaguggcguuggcugcuagagcgaagcuuaccauggaaaaauucgcaccagaauuccacggagaagacgcaaacaacagagcaacaaaauuccuagaaucaauaaaaggaaaauucacaagcccaaaagaucccaaaaaaaaagacucaaucauaagcguaaacucaauagauauagaaguaacaaaagaaaguccaauaacaagcaacaguacaauaauaaacccaacaaaugaaacagacgauacagcaggcaacaaaccaaacuaccaaagaaaaccgcuaguaaguuucaaagaagacccaacaccaagcgauaacccauuuucaaaauuauacaaagaaacaauagaaacauucgacaacaacgaagaagaaagcucauacucauacgaagaaauaaacgaccaaacaaacgacaacauaacagcgagauuagacagaauagacgaaaaacuaucagaaauacuaggcauguuacacacauuaguaguagcaagcgcaggaccaacaucagcaagagacggaauccgagacgcaaugguaggacuaagagaagaaaugauagaaaaaauaagaacagaagcacuaaugacaaacgacagacuagaagccauggcaagacuaagaaacgaagaaucagaaaaaauggcaaaagacacaucagacgaaguaucacuaaacccaacaagcgaaaaacuaaacaaccuauuagaaggaaacgacagcgacaacgaccuaucacucgaagacuucuaaggacuaguguccaccugucccuccugggcugcuggauugucucguuuuccugccaaauaaacaggaucagcgcuuuacagaucuaaaaaaaaaaaaaaaaaaaaaaaaaaaaaaaaaaaaaaaaaaaaaaaaaaaaaaaaaaaaaaaaugcaucccccccccccccccccccccccccccccccaaaggcucuuuucagagccaccagaauu

SEQ ID NO: 20646 - RNA, 995 nt, Artificial Sequence
  mRNA product Design b-2 comprising derived and/or modified sequence from HRSV(Memphis-37)__AIY60637.1__P (opt11)
gggagagccucugcuggaguccggggaguggcguuggcugcuagagcgaagcuuaccauggaaaaauucgccccagaauuucacggcgaagacgccaacaaccgagccaccaaauuccucgaaucaauaaaaggcaaauucacaucccccaaagaccccaaaaaaaaagacucgaucaucuccgugaacucaaucgacauagaagucaccaaagaaagccccaucaccuccaacagcaccaucaucaaccccacaaacgaaacagacgacaccgccggcaacaaaccaaacuaccaacgaaaaccccucgucagcuucaaagaagaccccacaccaagcgacaaccccuucuccaaacucuacaaagaaacaauagaaaccuucgacaacaacgaagaagaaagcucguacucauacgaagaaaucaacgaccaaaccaacgacaacaucaccgcccgccucgaccgcaucgacgaaaaacucuccgaaauccucggaaugcuccacacacucgucgucgccagcgccggccccaccucagcccgggacggcauccgcgacgccauggugggccuccgcgaggaaaugaucgaaaaaauccgcacagaagcccucaugaccaacgaccgccucgaagccauggcccgccuccgcaacgaagaauccgaaaaaauggccaaagacaccuccgacgaagucucacuaaaccccaccuccgaaaaacuaaacaaccuccuagaaggcaacgacagcgacaacgaccucucccuagaagacuucuaaggacuaguguccaccugucccuccugggcugcuggauugucucguuuuccugccaaauaaacaggaucagcgcuuuacagaucuaaaaaaaaaaaaaaaaaaaaaaaaaaaaaaaaaaaaaaaaaaaaaaaaaaaaaaaaaaaaaaaaugcaucccccccccccccccccccccccccccccccaaaggcucuuuucagagccaccagaauu

SEQ ID NO: 20647 - RNA, 1015 nt, Artificial Sequence
  mRNA product Design b-3 comprising derived and/or modified sequence from HRSV(Memphis-37)__AIY60637.1__P (wt)
gggagagucccgcagucggcguccagcggcucugcuuguucgugugugugucguugcaggccuuauucaagcuuaccauggaaaaguuugcuccugaauuccauggagaagacgcaaacaacagagccacuaaauuccuagaaucaauaaagggcaaauucacaucaccuaaagaucccaagaaaaaagauaguaucauaucugucaacucaauagauauagaaguaaccaaagaaagcccuauaacuucaaauucaaccauuauaaacccuacaaaugagacagaugauacugcagggaacaagcccaauuaucaaagaaaaccacuagugaguuucaaagaagacccuacgccaagugauaaucccuuuucaaaacuauacaaagaaaccauagaaacauuugauaacaaugaagaagaaucuagcuauucauaugaagaaauaaaugaucagacaaacgauaauauaacagcaagauuagauaggauugaugaaaaauuaagugaaauacuaggaaugcuucacacacuaguaguagcaagugcaggaccuacaucugcucgggaugguauaagagaugccaugguugguuuaagagaagaaaugauagaaaaaaucagaacugaagcauugaugaccaaugauagauuagaagcuauggcaagacucaggaaugaggaaagugaaaagauggcaaaagacacaucagaugaagugucucucaauccaacaucagagaaauugaacaaccuguuggaaggaaaugauagugauaaugaucuaucacuugaagauuucugaggacuaguguccaccugucccuccugggcugcuggauugucucguuuuccugccaaauaaacaggaucagcgcuuuacagaucuaaaaaaaaaaaaaaaaaaaaaaaaaaaaaaaaaaaaaaaaaaaaaaaaaaaaaaaaaaaaaaaaugcaucccccccccccccccccccccccccccccccaaaggcucuuuucagagccaccagaauu

SEQ ID NO: 20648 - RNA, 1015 nt, Artificial Sequence
  mRNA product Design b-3 comprising derived and/or modified sequence from HRSV(Memphis-37)__AIY60637.1__P (opt1)
gggagagucccgcagucggcguccagcggcucugcuuguucgugugugugucguugcaggccuuauucaagcuuaccauggagaaguucgcccccgaguuccacggcgaggacgccaacaaccgcgcgaccaaguuccuggagagcaucaaggggaaguucaccuccccgaaggaccccaagaagaaggacagcaucaucuccgugaacagcaucgacaucgaggucacgaaggagucccccaucaccagcaacuccaccaucaucaaccccaccaacgagacggacgacaccgccggcaacaagccgaacuaccagcggaagccccucgugagcuucaaggaggaccccacccccuccgacaacccguucagcaagcuguacaaggagaccaucgagacguucgacaacaacgaggaggaguccagcuacuccuacgaggagaucaacgaccagaccaacgacaacaucaccgcccgccuggaccggaucgacgagaagcucagcgagauccuggggaugcugcacacccucguggucgccuccgccggccccacgagcgcgcgcgacgggauccgggacgccauggugggccugcgcgaggagaugaucgagaagauccggaccgaggcccugaugaccaacgaccgccucgaggccauggcgcggcugcgcaacgaggaguccgagaagauggccaaggacaccagcgacgaggugucccugaaccccacgagcgagaagcucaacaaccugcuggagggcaacgacagcgacaacgaccucucccuggaggacuucugaggacuaguguccaccugucccuccugggcugcuggauugucucguuuuccugccaaauaaacaggaucagcgcuuuacagaucuaaaaaaaaaaaaaaaaaaaaaaaaaaaaaaaaaaaaaaaaaaaaaaaaaaaaaaaaaaaaaaaaugcaucccccccccccccccccccccccccccccccaaaggcucuuuucagagccaccagaauu

SEQ ID NO: 20649 - RNA, 1015 nt, Artificial Sequence
  mRNA product Design b-3 comprising derived and/or modified sequence from HRSV(Memphis-37)__AIY60637.1__P (opt2)
gggagagucccgcagucggcguccagcggcucugcuuguucgugugugugucguugcaggccuuauucaagcuuaccauggagaaguucgcccccgaguuccacggcgaggacgccaacaaccgcgccaccaaguuccucgaguccaucaagggcaaguucaccucccccaaggaccccaagaagaaggacuccaucaucuccgucaacuccaucgacaucgaggucaccaaggagucccccaucaccuccaacuccaccaucaucaaccccaccaacgagaccgacgacaccgccggcaacaagcccaacuaccagcgcaagccccucgucuccuucaaggaggaccccacccccuccgacaaccccuucuccaagcucuacaaggagaccaucgagaccuucgacaacaacgaggaggaguccuccuacuccuacgaggagaucaacgaccagaccaacgacaacaucaccgcccgccucgaccgcaucgacgagaagcucuccgagauccucggcaugcuccacacccucgucgucgccuccgccggccccaccuccgcccgcgacggcauccgcgacgccauggucggccuccgcgaggagaugaucgagaagauccgcaccgaggcccucaugaccaacgaccgccucgaggccauggcccgccuccgcaacgaggaguccgagaagauggccaaggacaccuccgacgaggucucccucaaccccaccuccgagaagcucaacaaccuccucgagggcaacgacuccgacaacgaccucucccucgaggacuucugaggacuaguguccaccugucccuccugggcugcuggauugucucguuuuccugccaaauaaacaggaucagcgcuuuacagaucuaaaaaaaaaaaaaaaaaaaaaaaaaaaaaaaaaaaaaaaaaaaaaaaaaaaaaaaaaaaaaaaaugcaucccccccccccccccccccccccccccccccaaaggcucuuuucagagccaccagaauu

SEQ ID NO: 20650 - RNA, 1015 nt, Artificial Sequence
  mRNA product Design b-3 comprising derived and/or modified sequence from HRSV(Memphis-37)__AIY60637.1__P (opt3)
gggagagucccgcagucggcguccagcggcucugcuuguucgugugugugucguugcaggccuuauucaagcuuaccauggagaaguucgcccccgaauuucacggcgaggacgcuaacaauagagcaaccaaauuccuggaaagcaucaaggggaaauuuacauccccuaaggauccgaaaaagaaggacucuauuauaucagugaacaguaucgauauugaggucacuaaagaaagcccaaucacguccaauucuaccauuaucaaccccacaaaugagacugacgauaccgccggaaacaagccuaauuaccagaggaaaccacucguuucguucaaggaggaccccacaccuucagauaacccauuuagcaaacuuuauaaggaaaccauagagacuuucgacaauaacgaagaggagaguuccuacucuuaugaagagaucaaugaucaaacaaacgacaauauuaccgcgcggcuggaucgcaucgacgaaaaguugagcgagauuuuagguaugcugcauacgcuagugguagcuuccgccggccccacuucagcacgagaugggauccgugacgccauggugggacucagagaagagaugauagagaaaauuaggaccgaagcucugaugacaaacgaccggcuugaggcaauggcccgccugagaaaugaagagagugaaaagauggcuaaagauacuagcgacgaggucucuuugaacccuaccuccgagaagcucaacaaucugcuggaaggcaacgauucagacaaugaucucagcuuagaggacuuuugaggacuaguguccaccugucccuccugggcugcuggauugucucguuuuccugccaaauaaacaggaucagcgcuuuacagaucuaaaaaaaaaaaaaaaaaaaaaaaaaaaaaaaaaaaaaaaaaaaaaaaaaaaaaaaaaaaaaaaaugcaucccccccccccccccccccccccccccccccaaaggcucuuuucagagccaccagaauu

SEQ ID NO: 20651 - RNA, 1015 nt, Artificial Sequence
  mRNA product Design b-3 comprising derived and/or modified sequence from HRSV(Memphis-37)__AIY60637.1__P (opt4)
gggagagucccgcagucggcguccagcggcucugcuuguucgugugugugucguugcaggccuuauucaagcuuaccauggagaaguucgcccccgaguuccacggcgaggacgccaacaacagagccaccaaguuccuggagagcaucaagggcaaguucaccagccccaaggaccccaagaagaaggacagcaucaucagcgugaacagcaucgacaucgaggugaccaaggagagccccaucaccagcaacagcaccaucaucaaccccaccaacgagaccgacgacaccgccggcaacaagcccaacuaccagagaaagccccuggugagcuucaaggaggaccccacccccagcgacaaccccuucagcaagcuguacaaggagaccaucgagaccuucgacaacaacgaggaggagagcagcuacagcuacgaggagaucaacgaccagaccaacgacaacaucaccgccagacuggacagaaucgacgagaagcugagcgagauccugggcaugcugcacacccuggugguggccagcgccggccccaccagcgccagagacggcaucagagacgccauggugggccugagagaggagaugaucgagaagaucagaaccgaggcccugaugaccaacgacagacuggaggccauggccagacugagaaacgaggagagcgagaagauggccaaggacaccagcgacgaggugagccugaaccccaccagcgagaagcugaacaaccugcuggagggcaacgacagcgacaacgaccugagccuggaggacuucugaggacuaguguccaccugucccuccugggcugcuggauugucucguuuuccugccaaauaaacaggaucagcgcuuuacagaucuaaaaaaaaaaaaaaaaaaaaaaaaaaaaaaaaaaaaaaaaaaaaaaaaaaaaaaaaaaaaaaaaugcaucccccccccccccccccccccccccccccccaaaggcucuuuucagagccaccagaauu

SEQ ID NO: 20652 - RNA, 1015 nt, Artificial Sequence
  mRNA product Design b-3 comprising derived and/or modified sequence from HRSV(Memphis-37)__AIY60637.1__P (opt5)
gggagagucccgcagucggcguccagcggcucugcuuguucgugugugugucguugcaggccuuauucaagcuuaccauggagaaguucgcccccgaauuucacggcgaggacgcuaacaauagagccaccaaauuccuggaaagcaucaaggggaaauuuacauccccuaaggauccgaaaaagaaggacucuauuaucagcgugaacuccauugauaucgaggucacgaaagaaucucccauuaccagcaauuccacaaucaucaacccuaccaaugagacagacgauaccgcgggaaacaagcccaauuaccagcggaaaccucucguuucuuucaaggaggaccccacaccuagcgauaacccguuuuccaaacuguauaaggaaaccauugagacguucgacaauaacgaagaggagagcucuuacuccuaugaagagaucaaugaucaaaccaacgacaauauuacagcucgccuugauagaaucgacgaaaagcugagcgagauucucggcaugcugcauacccuugugguggccucugccgggcccacauccgcucgggauggaauccgcgacgccauggucggccugagagaagagaugauugagaaaauccggaccgaagcucucaugacgaacgaccgccuggaggccauggcgagacugcggaaugaagagagcgaaaagauggccaaagauacaucugacgaggugucccucaacccuaccagcgagaagcugaacaaucuucuggaagggaacgauuccgacaaugaucucucucuggaggacuuuugaggacuaguguccaccugucccuccugggcugcuggauugucucguuuuccugccaaauaaacaggaucagcgcuuuacagaucuaaaaaaaaaaaaaaaaaaaaaaaaaaaaaaaaaaaaaaaaaaaaaaaaaaaaaaaaaaaaaaaaugcaucccccccccccccccccccccccccccccccaaaggcucuuuucagagccaccagaauu

SEQ ID NO: 20653 - RNA, 1015 nt, Artificial Sequence
  mRNA product Design b-3 comprising derived and/or modified sequence from HRSV(Memphis-37)__AIY60637.1__P (opt6)
gggagagucccgcagucggcguccagcggcucugcuuguucgugugugugucguugcaggccuuauucaagcuuaccauggaaaaauucgcaccagaauuccacggagaagacgcaaacaacagagcaacaaaauuccuagaaucaauaaaaggaaaauucacaagcccaaaagaucccaaaaaaaaagacucaaucauaagcguaaacucaauagauauagaaguaacaaaagaaaguccaauaacaagcaacaguacaauaauaaacccaacaaaugaaacagacgauacagcaggcaacaaaccaaacuaccaaagaaaaccgcuaguaaguuucaaagaagacccaacaccaagcgauaacccauuuucaaaauuauacaaagaaacaauagaaacauucgacaacaacgaagaagaaagcucauacucauacgaagaaauaaacgaccaaacaaacgacaacauaacagcgagauuagacagaauagacgaaaaacuaucagaaauacuaggcauguuacacacauuaguaguagcaagcgcaggaccaacaucagcaagagacggaauccgagacgcaaugguaggacuaagagaagaaaugauagaaaaaauaagaacagaagcacuaaugacaaacgacagacuagaagccauggcaagacuaagaaacgaagaaucagaaaaaauggcaaaagacacaucagacgaaguaucacuaaacccaacaagcgaaaaacuaaacaaccuauuagaaggaaacgacagcgacaacgaccuaucacucgaagacuucuaaggacuaguguccaccugucccuccugggcugcuggauugucucguuuuccugccaaauaaacaggaucagcgcuuuacagaucuaaaaaaaaaaaaaaaaaaaaaaaaaaaaaaaaaaaaaaaaaaaaaaaaaaaaaaaaaaaaaaaaugcaucccccccccccccccccccccccccccccccaaaggcucuuuucagagccaccagaauu

SEQ ID NO: 20654 - RNA, 1015 nt, Artificial Sequence
  mRNA product Design b-3 comprising derived and/or modified sequence from HRSV(Memphis-37)__AIY60637.1__P (opt11)
gggagagucccgcagucggcguccagcggcucugcuuguucgugugugugucguugcaggccuuauucaagcuuaccauggaaaaauucgccccagaauuucacggcgaagacgccaacaaccgagccaccaaauuccucgaaucaauaaaaggcaaauucacaucccccaaagaccccaaaaaaaaagacucgaucaucuccgugaacucaaucgacauagaagucaccaaagaaagccccaucaccuccaacagcaccaucaucaaccccacaaacgaaacagacgacaccgccggcaacaaaccaaacuaccaacgaaaaccccucgucagcuucaaagaagaccccacaccaagcgacaaccccuucuccaaacucuacaaagaaacaauagaaaccuucgacaacaacgaagaagaaagcucguacucauacgaagaaaucaacgaccaaaccaacgacaacaucaccgcccgccucgaccgcaucgacgaaaaacucuccgaaauccucggaaugcuccacacacucgucgucgccagcgccggccccaccucagcccgggacggcauccgcgacgccauggugggccuccgcgaggaaaugaucgaaaaaauccgcacagaagcccucaugaccaacgaccgccucgaagccauggcccgccuccgcaacgaagaauccgaaaaaauggccaaagacaccuccgacgaagucucacuaaaccccaccuccgaaaaacuaaacaaccuccuagaaggcaacgacagcgacaacgaccucucccuagaagacuucuaaggacuaguguccaccugucccuccugggcugcuggauugucucguuuuccugccaaauaaacaggaucagcgcuuuacagaucuaaaaaaaaaaaaaaaaaaaaaaaaaaaaaaaaaaaaaaaaaaaaaaaaaaaaaaaaaaaaaaaaugcaucccccccccccccccccccccccccccccccaaaggcucuuuucagagccaccagaauu

SEQ ID NO: 20655 - RNA, 1066 nt, Artificial Sequence
  mRNA product Design b-4 comprising derived and/or modified sequence from HRSV(Memphis-37)__AIY60637.1__P (wt)
gggagagucccgcagucggcguccagcggcucugcuuguucgugugugugucguugcaggccuuauucaagcuuaccauggaaaaguuugcuccugaauuccauggagaagacgcaaacaacagagccacuaaauuccuagaaucaauaaagggcaaauucacaucaccuaaagaucccaagaaaaaagauaguaucauaucugucaacucaauagauauagaaguaaccaaagaaagcccuauaacuucaaauucaaccauuauaaacccuacaaaugagacagaugauacugcagggaacaagcccaauuaucaaagaaaaccacuagugaguuucaaagaagacccuacgccaagugauaaucccuuuucaaaacuauacaaagaaaccauagaaacauuugauaacaaugaagaagaaucuagcuauucauaugaagaaauaaaugaucagacaaacgauaauauaacagcaagauuagauaggauugaugaaaaauuaagugaaauacuaggaaugcuucacacacuaguaguagcaagugcaggaccuacaucugcucgggaugguauaagagaugccaugguugguuuaagagaagaaaugauagaaaaaaucagaacugaagcauugaugaccaaugauagauuagaagcuauggcaagacucaggaaugaggaaagugaaaagauggcaaaagacacaucagaugaagugucucucaauccaacaucagagaaauugaacaaccuguuggaaggaaaugauagugauaaugaucuaucacuugaagauuucugaggacuaguaauaaggaaacuguaugaaugucugugggcaggaagugaagagauccuucuguaaagguuuuuggaauuaugucugcugaauaauaaacuuuuuugaaauaauaaaucugguagaaaaaugagaucuaaaaaaaaaaaaaaaaaaaaaaaaaaaaaaaaaaaaaaaaaaaaaaaaaaaaaaaaaaaaaaaaugcaucccccccccccccccccccccccccccccccaaaggcucuuuucagagccaccagaauu

SEQ ID NO: 20656 - RNA, 1066 nt, Artificial Sequence
  mRNA product Design b-4 comprising derived and/or modified sequence from HRSV(Memphis-37)__AIY60637.1__P (opt1)
gggagagucccgcagucggcguccagcggcucugcuuguucgugugugugucguugcaggccuuauucaagcuuaccauggagaaguucgcccccgaguuccacggcgaggacgccaacaaccgcgcgaccaaguuccuggagagcaucaaggggaaguucaccuccccgaaggaccccaagaagaaggacagcaucaucuccgugaacagcaucgacaucgaggucacgaaggagucccccaucaccagcaacuccaccaucaucaaccccaccaacgagacggacgacaccgccggcaacaagccgaacuaccagcggaagccccucgugagcuucaaggaggaccccacccccuccgacaacccguucagcaagcuguacaaggagaccaucgagacguucgacaacaacgaggaggaguccagcuacuccuacgaggagaucaacgaccagaccaacgacaacaucaccgcccgccuggaccggaucgacgagaagcucagcgagauccuggggaugcugcacacccucguggucgccuccgccggccccacgagcgcgcgcgacgggauccgggacgccauggugggccugcgcgaggagaugaucgagaagauccggaccgaggcccugaugaccaacgaccgccucgaggccauggcgcggcugcgcaacgaggaguccgagaagauggccaaggacaccagcgacgaggugucccugaaccccacgagcgagaagcucaacaaccugcuggagggcaacgacagcgacaacgaccucucccuggaggacuucugaggacuaguaauaaggaaacuguaugaaugucugugggcaggaagugaagagauccuucuguaaagguuuuuggaauuaugucugcugaauaauaaacuuuuuugaaauaauaaaucugguagaaaaaugagaucuaaaaaaaaaaaaaaaaaaaaaaaaaaaaaaaaaaaaaaaaaaaaaaaaaaaaaaaaaaaaaaaaugcaucccccccccccccccccccccccccccccccaaaggcucuuuucagagccaccagaauu

SEQ ID NO: 20657 - RNA, 1066 nt, Artificial Sequence
  mRNA product Design b-4 comprising derived and/or modified sequence from HRSV(Memphis-37)__AIY60637.1__P (opt2)
gggagagucccgcagucggcguccagcggcucugcuuguucgugugugugucguugcaggccuuauucaagcuuaccauggagaaguucgcccccgaguuccacggcgaggacgccaacaaccgcgccaccaaguuccucgaguccaucaagggcaaguucaccucccccaaggaccccaagaagaaggacuccaucaucuccgucaacuccaucgacaucgaggucaccaaggagucccccaucaccuccaacuccaccaucaucaaccccaccaacgagaccgacgacaccgccggcaacaagcccaacuaccagcgcaagccccucgucuccuucaaggaggaccccacccccuccgacaaccccuucuccaagcucuacaaggagaccaucgagaccuucgacaacaacgaggaggaguccuccuacuccuacgaggagaucaacgaccagaccaacgacaacaucaccgcccgccucgaccgcaucgacgagaagcucuccgagauccucggcaugcuccacacccucgucgucgccuccgccggccccaccuccgcccgcgacggcauccgcgacgccauggucggccuccgcgaggagaugaucgagaagauccgcaccgaggcccucaugaccaacgaccgccucgaggccauggcccgccuccgcaacgaggaguccgagaagauggccaaggacaccuccgacgaggucucccucaaccccaccuccgagaagcucaacaaccuccucgagggcaacgacuccgacaacgaccucucccucgaggacuucugaggacuaguaauaaggaaacuguaugaaugucugugggcaggaagugaagagauccuucuguaaagguuuuuggaauuaugucugcugaauaauaaacuuuuuugaaauaauaaaucugguagaaaaaugagaucuaaaaaaaaaaaaaaaaaaaaaaaaaaaaaaaaaaaaaaaaaaaaaaaaaaaaaaaaaaaaaaaaugcaucccccccccccccccccccccccccccccccaaaggcucuuuucagagccaccagaauu

SEQ ID NO: 20658 - RNA, 1066 nt, Artificial Sequence
  mRNA product Design b-4 comprising derived and/or modified sequence from HRSV(Memphis-37)__AIY60637.1__P (opt3)
gggagagucccgcagucggcguccagcggcucugcuuguucgugugugugucguugcaggccuuauucaagcuuaccauggagaaguucgcccccgaauuucacggcgaggacgcuaacaauagagcaaccaaauuccuggaaagcaucaaggggaaauuuacauccccuaaggauccgaaaaagaaggacucuauuauaucagugaacaguaucgauauugaggucacuaaagaaagcccaaucacguccaauucuaccauuaucaaccccacaaaugagacugacgauaccgccggaaacaagccuaauuaccagaggaaaccacucguuucguucaaggaggaccccacaccuucagauaacccauuuagcaaacuuuauaaggaaaccauagagacuuucgacaauaacgaagaggagaguuccuacucuuaugaagagaucaaugaucaaacaaacgacaauauuaccgcgcggcuggaucgcaucgacgaaaaguugagcgagauuuuagguaugcugcauacgcuagugguagcuuccgccggccccacuucagcacgagaugggauccgugacgccauggugggacucagagaagagaugauagagaaaauuaggaccgaagcucugaugacaaacgaccggcuugaggcaauggcccgccugagaaaugaagagagugaaaagauggcuaaagauacuagcgacgaggucucuuugaacccuaccuccgagaagcucaacaaucugcuggaaggcaacgauucagacaaugaucucagcuuagaggacuuuugaggacuaguaauaaggaaacuguaugaaugucugugggcaggaagugaagagauccuucuguaaagguuuuuggaauuaugucugcugaauaauaaacuuuuuugaaauaauaaaucugguagaaaaaugagaucuaaaaaaaaaaaaaaaaaaaaaaaaaaaaaaaaaaaaaaaaaaaaaaaaaaaaaaaaaaaaaaaaugcaucccccccccccccccccccccccccccccccaaaggcucuuuucagagccaccagaauu

SEQ ID NO: 20659 - RNA, 1066 nt, Artificial Sequence
  mRNA product Design b-4 comprising derived and/or modified sequence from HRSV(Memphis-37)__AIY60637.1__P (opt4)
gggagagucccgcagucggcguccagcggcucugcuuguucgugugugugucguugcaggccuuauucaagcuuaccauggagaaguucgcccccgaguuccacggcgaggacgccaacaacagagccaccaaguuccuggagagcaucaagggcaaguucaccagccccaaggaccccaagaagaaggacagcaucaucagcgugaacagcaucgacaucgaggugaccaaggagagccccaucaccagcaacagcaccaucaucaaccccaccaacgagaccgacgacaccgccggcaacaagcccaacuaccagagaaagccccuggugagcuucaaggaggaccccacccccagcgacaaccccuucagcaagcuguacaaggagaccaucgagaccuucgacaacaacgaggaggagagcagcuacagcuacgaggagaucaacgaccagaccaacgacaacaucaccgccagacuggacagaaucgacgagaagcugagcgagauccugggcaugcugcacacccuggugguggccagcgccggccccaccagcgccagagacggcaucagagacgccauggugggccugagagaggagaugaucgagaagaucagaaccgaggcccugaugaccaacgacagacuggaggccauggccagacugagaaacgaggagagcgagaagauggccaaggacaccagcgacgaggugagccugaaccccaccagcgagaagcugaacaaccugcuggagggcaacgacagcgacaacgaccugagccuggaggacuucugaggacuaguaauaaggaaacuguaugaaugucugugggcaggaagugaagagauccuucuguaaagguuuuuggaauuaugucugcugaauaauaaacuuuuuugaaauaauaaaucugguagaaaaaugagaucuaaaaaaaaaaaaaaaaaaaaaaaaaaaaaaaaaaaaaaaaaaaaaaaaaaaaaaaaaaaaaaaaugcaucccccccccccccccccccccccccccccccaaaggcucuuuucagagccaccagaauu

SEQ ID NO: 20660 - RNA, 1066 nt, Artificial Sequence
  mRNA product Design b-4 comprising derived and/or modified sequence from HRSV(Memphis-37)__AIY60637.1__P (opt5)
gggagagucccgcagucggcguccagcggcucugcuuguucgugugugugucguugcaggccuuauucaagcuuaccauggagaaguucgcccccgaauuucacggcgaggacgcuaacaauagagccaccaaauuccuggaaagcaucaaggggaaauuuacauccccuaaggauccgaaaaagaaggacucuauuaucagcgugaacuccauugauaucgaggucacgaaagaaucucccauuaccagcaauuccacaaucaucaacccuaccaaugagacagacgauaccgcgggaaacaagcccaauuaccagcggaaaccucucguuucuuucaaggaggaccccacaccuagcgauaacccguuuuccaaacuguauaaggaaaccauugagacguucgacaauaacgaagaggagagcucuuacuccuaugaagagaucaaugaucaaaccaacgacaauauuacagcucgccuugauagaaucgacgaaaagcugagcgagauucucggcaugcugcauacccuugugguggccucugccgggcccacauccgcucgggauggaauccgcgacgccauggucggccugagagaagagaugauugagaaaauccggaccgaagcucucaugacgaacgaccgccuggaggccauggcgagacugcggaaugaagagagcgaaaagauggccaaagauacaucugacgaggugucccucaacccuaccagcgagaagcugaacaaucuucuggaagggaacgauuccgacaaugaucucucucuggaggacuuuugaggacuaguaauaaggaaacuguaugaaugucugugggcaggaagugaagagauccuucuguaaagguuuuuggaauuaugucugcugaauaauaaacuuuuuugaaauaauaaaucugguagaaaaaugagaucuaaaaaaaaaaaaaaaaaaaaaaaaaaaaaaaaaaaaaaaaaaaaaaaaaaaaaaaaaaaaaaaaugcaucccccccccccccccccccccccccccccccaaaggcucuuuucagagccaccagaauu

SEQ ID NO: 20661 - RNA, 1066 nt, Artificial Sequence
  mRNA product Design b-4 comprising derived and/or modified sequence from HRSV(Memphis-37)__AIY60637.1__P (opt6)
gggagagucccgcagucggcguccagcggcucugcuuguucgugugugugucguugcaggccuuauucaagcuuaccauggaaaaauucgcaccagaauuccacggagaagacgcaaacaacagagcaacaaaauuccuagaaucaauaaaaggaaaauucacaagcccaaaagaucccaaaaaaaaagacucaaucauaagcguaaacucaauagauauagaaguaacaaaagaaaguccaauaacaagcaacaguacaauaauaaacccaacaaaugaaacagacgauacagcaggcaacaaaccaaacuaccaaagaaaaccgcuaguaaguuucaaagaagacccaacaccaagcgauaacccauuuucaaaauuauacaaagaaacaauagaaacauucgacaacaacgaagaagaaagcucauacucauacgaagaaauaaacgaccaaacaaacgacaacauaacagcgagauuagacagaauagacgaaaaacuaucagaaauacuaggcauguuacacacauuaguaguagcaagcgcaggaccaacaucagcaagagacggaauccgagacgcaaugguaggacuaagagaagaaaugauagaaaaaauaagaacagaagcacuaaugacaaacgacagacuagaagccauggcaagacuaagaaacgaagaaucagaaaaaauggcaaaagacacaucagacgaaguaucacuaaacccaacaagcgaaaaacuaaacaaccuauuagaaggaaacgacagcgacaacgaccuaucacucgaagacuucuaaggacuaguaauaaggaaacuguaugaaugucugugggcaggaagugaagagauccuucuguaaagguuuuuggaauuaugucugcugaauaauaaacuuuuuugaaauaauaaaucugguagaaaaaugagaucuaaaaaaaaaaaaaaaaaaaaaaaaaaaaaaaaaaaaaaaaaaaaaaaaaaaaaaaaaaaaaaaaugcaucccccccccccccccccccccccccccccccaaaggcucuuuucagagccaccagaauu

SEQ ID NO: 20662 - RNA, 1066 nt, Artificial Sequence
  mRNA product Design b-4 comprising derived and/or modified sequence from HRSV(Memphis-37)__AIY60637.1__P (opt11)
gggagagucccgcagucggcguccagcggcucugcuuguucgugugugugucguugcaggccuuauucaagcuuaccauggaaaaauucgccccagaauuucacggcgaagacgccaacaaccgagccaccaaauuccucgaaucaauaaaaggcaaauucacaucccccaaagaccccaaaaaaaaagacucgaucaucuccgugaacucaaucgacauagaagucaccaaagaaagccccaucaccuccaacagcaccaucaucaaccccacaaacgaaacagacgacaccgccggcaacaaaccaaacuaccaacgaaaaccccucgucagcuucaaagaagaccccacaccaagcgacaaccccuucuccaaacucuacaaagaaacaauagaaaccuucgacaacaacgaagaagaaagcucguacucauacgaagaaaucaacgaccaaaccaacgacaacaucaccgcccgccucgaccgcaucgacgaaaaacucuccgaaauccucggaaugcuccacacacucgucgucgccagcgccggccccaccucagcccgggacggcauccgcgacgccauggugggccuccgcgaggaaaugaucgaaaaaauccgcacagaagcccucaugaccaacgaccgccucgaagccauggcccgccuccgcaacgaagaauccgaaaaaauggccaaagacaccuccgacgaagucucacuaaaccccaccuccgaaaaacuaaacaaccuccuagaaggcaacgacagcgacaacgaccucucccuagaagacuucuaaggacuaguaauaaggaaacuguaugaaugucugugggcaggaagugaagagauccuucuguaaagguuuuuggaauuaugucugcugaauaauaaacuuuuuugaaauaauaaaucugguagaaaaaugagaucuaaaaaaaaaaaaaaaaaaaaaaaaaaaaaaaaaaaaaaaaaaaaaaaaaaaaaaaaaaaaaaaaugcaucccccccccccccccccccccccccccccccaaaggcucuuuucagagccaccagaauu

SEQ ID NO: 20663 - RNA, 1128 nt, Artificial Sequence
  mRNA product Design b-5 comprising derived and/or modified sequence from HRSV(Memphis-37)__AIY60637.1__P (wt)
gggagacuccugucgggcggaaguaggaggaguagaguuuaaaaacaguacucuuuuuccgguucgggacguaguugaagcaacgacaagccggauaaccgcucuugagacaggaagcuuaccauggaaaaguuugcuccugaauuccauggagaagacgcaaacaacagagccacuaaauuccuagaaucaauaaagggcaaauucacaucaccuaaagaucccaagaaaaaagauaguaucauaucugucaacucaauagauauagaaguaaccaaagaaagcccuauaacuucaaauucaaccauuauaaacccuacaaaugagacagaugauacugcagggaacaagcccaauuaucaaagaaaaccacuagugaguuucaaagaagacccuacgccaagugauaaucccuuuucaaaacuauacaaagaaaccauagaaacauuugauaacaaugaagaagaaucuagcuauucauaugaagaaauaaaugaucagacaaacgauaauauaacagcaagauuagauaggauugaugaaaaauuaagugaaauacuaggaaugcuucacacacuaguaguagcaagugcaggaccuacaucugcucgggaugguauaagagaugccaugguugguuuaagagaagaaaugauagaaaaaaucagaacugaagcauugaugaccaaugauagauuagaagcuauggcaagacucaggaaugaggaaagugaaaagauggcaaaagacacaucagaugaagugucucucaauccaacaucagagaaauugaacaaccuguuggaaggaaaugauagugauaaugaucuaucacuugaagauuucugaggacuaguacuggcugcaucucccuuuccucuguccuccauccuucucccaggauggugaagggggaccugguacccagugauccccaccccaggauccuaaaucaugacuuaccugcuaauaaaaacucauuggaaaagugagaagaucuaaaaaaaaaaaaaaaaaaaaaaaaaaaaaaaaaaaaaaaaaaaaaaaaaaaaaaaaaaaaaaaaugcaucccccccccccccccccccccccccccccccaaaggcucuuuucagagccaccagaauu

SEQ ID NO: 20664 - RNA, 1128 nt, Artificial Sequence
  mRNA product Design b-5 comprising derived and/or modified sequence from HRSV(Memphis-37)__AIY60637.1__P (opt1)
gggagacuccugucgggcggaaguaggaggaguagaguuuaaaaacaguacucuuuuuccgguucgggacguaguugaagcaacgacaagccggauaaccgcucuugagacaggaagcuuaccauggagaaguucgcccccgaguuccacggcgaggacgccaacaaccgcgcgaccaaguuccuggagagcaucaaggggaaguucaccuccccgaaggaccccaagaagaaggacagcaucaucuccgugaacagcaucgacaucgaggucacgaaggagucccccaucaccagcaacuccaccaucaucaaccccaccaacgagacggacgacaccgccggcaacaagccgaacuaccagcggaagccccucgugagcuucaaggaggaccccacccccuccgacaacccguucagcaagcuguacaaggagaccaucgagacguucgacaacaacgaggaggaguccagcuacuccuacgaggagaucaacgaccagaccaacgacaacaucaccgcccgccuggaccggaucgacgagaagcucagcgagauccuggggaugcugcacacccucguggucgccuccgccggccccacgagcgcgcgcgacgggauccgggacgccauggugggccugcgcgaggagaugaucgagaagauccggaccgaggcccugaugaccaacgaccgccucgaggccauggcgcggcugcgcaacgaggaguccgagaagauggccaaggacaccagcgacgaggugucccugaaccccacgagcgagaagcucaacaaccugcuggagggcaacgacagcgacaacgaccucucccuggaggacuucugaggacuaguacuggcugcaucucccuuuccucuguccuccauccuucucccaggauggugaagggggaccugguacccagugauccccaccccaggauccuaaaucaugacuuaccugcuaauaaaaacucauuggaaaagugagaagaucuaaaaaaaaaaaaaaaaaaaaaaaaaaaaaaaaaaaaaaaaaaaaaaaaaaaaaaaaaaaaaaaaugcaucccccccccccccccccccccccccccccccaaaggcucuuuucagagccaccagaauu

SEQ ID NO: 20665 - RNA, 1128 nt, Artificial Sequence
  mRNA product Design b-5 comprising derived and/or modified sequence from HRSV(Memphis-37)__AIY60637.1__P (opt2)
gggagacuccugucgggcggaaguaggaggaguagaguuuaaaaacaguacucuuuuuccgguucgggacguaguugaagcaacgacaagccggauaaccgcucuugagacaggaagcuuaccauggagaaguucgcccccgaguuccacggcgaggacgccaacaaccgcgccaccaaguuccucgaguccaucaagggcaaguucaccucccccaaggaccccaagaagaaggacuccaucaucuccgucaacuccaucgacaucgaggucaccaaggagucccccaucaccuccaacuccaccaucaucaaccccaccaacgagaccgacgacaccgccggcaacaagcccaacuaccagcgcaagccccucgucuccuucaaggaggaccccacccccuccgacaaccccuucuccaagcucuacaaggagaccaucgagaccuucgacaacaacgaggaggaguccuccuacuccuacgaggagaucaacgaccagaccaacgacaacaucaccgcccgccucgaccgcaucgacgagaagcucuccgagauccucggcaugcuccacacccucgucgucgccuccgccggccccaccuccgcccgcgacggcauccgcgacgccauggucggccuccgcgaggagaugaucgagaagauccgcaccgaggcccucaugaccaacgaccgccucgaggccauggcccgccuccgcaacgaggaguccgagaagauggccaaggacaccuccgacgaggucucccucaaccccaccuccgagaagcucaacaaccuccucgagggcaacgacuccgacaacgaccucucccucgaggacuucugaggacuaguacuggcugcaucucccuuuccucuguccuccauccuucucccaggauggugaagggggaccugguacccagugauccccaccccaggauccuaaaucaugacuuaccugcuaauaaaaacucauuggaaaagugagaagaucuaaaaaaaaaaaaaaaaaaaaaaaaaaaaaaaaaaaaaaaaaaaaaaaaaaaaaaaaaaaaaaaaugcaucccccccccccccccccccccccccccccccaaaggcucuuuucagagccaccagaauu

SEQ ID NO: 20666 - RNA, 1128 nt, Artificial Sequence
  mRNA product Design b-5 comprising derived and/or modified sequence from HRSV(Memphis-37)__AIY60637.1__P (opt3)
gggagacuccugucgggcggaaguaggaggaguagaguuuaaaaacaguacucuuuuuccgguucgggacguaguugaagcaacgacaagccggauaaccgcucuugagacaggaagcuuaccauggagaaguucgcccccgaauuucacggcgaggacgcuaacaauagagcaaccaaauuccuggaaagcaucaaggggaaauuuacauccccuaaggauccgaaaaagaaggacucuauuauaucagugaacaguaucgauauugaggucacuaaagaaagcccaaucacguccaauucuaccauuaucaaccccacaaaugagacugacgauaccgccggaaacaagccuaauuaccagaggaaaccacucguuucguucaaggaggaccccacaccuucagauaacccauuuagcaaacuuuauaaggaaaccauagagacuuucgacaauaacgaagaggagaguuccuacucuuaugaagagaucaaugaucaaacaaacgacaauauuaccgcgcggcuggaucgcaucgacgaaaaguugagcgagauuuuagguaugcugcauacgcuagugguagcuuccgccggccccacuucagcacgagaugggauccgugacgccauggugggacucagagaagagaugauagagaaaauuaggaccgaagcucugaugacaaacgaccggcuugaggcaauggcccgccugagaaaugaagagagugaaaagauggcuaaagauacuagcgacgaggucucuuugaacccuaccuccgagaagcucaacaaucugcuggaaggcaacgauucagacaaugaucucagcuuagaggacuuuugaggacuaguacuggcugcaucucccuuuccucuguccuccauccuucucccaggauggugaagggggaccugguacccagugauccccaccccaggauccuaaaucaugacuuaccugcuaauaaaaacucauuggaaaagugagaagaucuaaaaaaaaaaaaaaaaaaaaaaaaaaaaaaaaaaaaaaaaaaaaaaaaaaaaaaaaaaaaaaaaugcaucccccccccccccccccccccccccccccccaaaggcucuuuucagagccaccagaauu

SEQ ID NO: 20667 - RNA, 1128 nt, Artificial Sequence
  mRNA product Design b-5 comprising derived and/or modified sequence from HRSV(Memphis-37)__AIY60637.1__P (opt4)
gggagacuccugucgggcggaaguaggaggaguagaguuuaaaaacaguacucuuuuuccgguucgggacguaguugaagcaacgacaagccggauaaccgcucuugagacaggaagcuuaccauggagaaguucgcccccgaguuccacggcgaggacgccaacaacagagccaccaaguuccuggagagcaucaagggcaaguucaccagccccaaggaccccaagaagaaggacagcaucaucagcgugaacagcaucgacaucgaggugaccaaggagagccccaucaccagcaacagcaccaucaucaaccccaccaacgagaccgacgacaccgccggcaacaagcccaacuaccagagaaagccccuggugagcuucaaggaggaccccacccccagcgacaaccccuucagcaagcuguacaaggagaccaucgagaccuucgacaacaacgaggaggagagcagcuacagcuacgaggagaucaacgaccagaccaacgacaacaucaccgccagacuggacagaaucgacgagaagcugagcgagauccugggcaugcugcacacccuggugguggccagcgccggccccaccagcgccagagacggcaucagagacgccauggugggccugagagaggagaugaucgagaagaucagaaccgaggcccugaugaccaacgacagacuggaggccauggccagacugagaaacgaggagagcgagaagauggccaaggacaccagcgacgaggugagccugaaccccaccagcgagaagcugaacaaccugcuggagggcaacgacagcgacaacgaccugagccuggaggacuucugaggacuaguacuggcugcaucucccuuuccucuguccuccauccuucucccaggauggugaagggggaccugguacccagugauccccaccccaggauccuaaaucaugacuuaccugcuaauaaaaacucauuggaaaagugagaagaucuaaaaaaaaaaaaaaaaaaaaaaaaaaaaaaaaaaaaaaaaaaaaaaaaaaaaaaaaaaaaaaaaugcaucccccccccccccccccccccccccccccccaaaggcucuuuucagagccaccagaauu

SEQ ID NO: 20668 - RNA, 1128 nt, Artificial Sequence
  mRNA product Design b-5 comprising derived and/or modified sequence from HRSV(Memphis-37)__AIY60637.1__P (opt5)
gggagacuccugucgggcggaaguaggaggaguagaguuuaaaaacaguacucuuuuuccgguucgggacguaguugaagcaacgacaagccggauaaccgcucuugagacaggaagcuuaccauggagaaguucgcccccgaauuucacggcgaggacgcuaacaauagagccaccaaauuccuggaaagcaucaaggggaaauuuacauccccuaaggauccgaaaaagaaggacucuauuaucagcgugaacuccauugauaucgaggucacgaaagaaucucccauuaccagcaauuccacaaucaucaacccuaccaaugagacagacgauaccgcgggaaacaagcccaauuaccagcggaaaccucucguuucuuucaaggaggaccccacaccuagcgauaacccguuuuccaaacuguauaaggaaaccauugagacguucgacaauaacgaagaggagagcucuuacuccuaugaagagaucaaugaucaaaccaacgacaauauuacagcucgccuugauagaaucgacgaaaagcugagcgagauucucggcaugcugcauacccuugugguggccucugccgggcccacauccgcucgggauggaauccgcgacgccauggucggccugagagaagagaugauugagaaaauccggaccgaagcucucaugacgaacgaccgccuggaggccauggcgagacugcggaaugaagagagcgaaaagauggccaaagauacaucugacgaggugucccucaacccuaccagcgagaagcugaacaaucuucuggaagggaacgauuccgacaaugaucucucucuggaggacuuuugaggacuaguacuggcugcaucucccuuuccucuguccuccauccuucucccaggauggugaagggggaccugguacccagugauccccaccccaggauccuaaaucaugacuuaccugcuaauaaaaacucauuggaaaagugagaagaucuaaaaaaaaaaaaaaaaaaaaaaaaaaaaaaaaaaaaaaaaaaaaaaaaaaaaaaaaaaaaaaaaugcaucccccccccccccccccccccccccccccccaaaggcucuuuucagagccaccagaauu

SEQ ID NO: 20669 - RNA, 1128 nt, Artificial Sequence
  mRNA product Design b-5 comprising derived and/or modified sequence from HRSV(Memphis-37)__AIY60637.1__P (opt6)
gggagacuccugucgggcggaaguaggaggaguagaguuuaaaaacaguacucuuuuuccgguucgggacguaguugaagcaacgacaagccggauaaccgcucuugagacaggaagcuuaccauggaaaaauucgcaccagaauuccacggagaagacgcaaacaacagagcaacaaaauuccuagaaucaauaaaaggaaaauucacaagcccaaaagaucccaaaaaaaaagacucaaucauaagcguaaacucaauagauauagaaguaacaaaagaaaguccaauaacaagcaacaguacaauaauaaacccaacaaaugaaacagacgauacagcaggcaacaaaccaaacuaccaaagaaaaccgcuaguaaguuucaaagaagacccaacaccaagcgauaacccauuuucaaaauuauacaaagaaacaauagaaacauucgacaacaacgaagaagaaagcucauacucauacgaagaaauaaacgaccaaacaaacgacaacauaacagcgagauuagacagaauagacgaaaaacuaucagaaauacuaggcauguuacacacauuaguaguagcaagcgcaggaccaacaucagcaagagacggaauccgagacgcaaugguaggacuaagagaagaaaugauagaaaaaauaagaacagaagcacuaaugacaaacgacagacuagaagccauggcaagacuaagaaacgaagaaucagaaaaaauggcaaaagacacaucagacgaaguaucacuaaacccaacaagcgaaaaacuaaacaaccuauuagaaggaaacgacagcgacaacgaccuaucacucgaagacuucuaaggacuaguacuggcugcaucucccuuuccucuguccuccauccuucucccaggauggugaagggggaccugguacccagugauccccaccccaggauccuaaaucaugacuuaccugcuaauaaaaacucauuggaaaagugagaagaucuaaaaaaaaaaaaaaaaaaaaaaaaaaaaaaaaaaaaaaaaaaaaaaaaaaaaaaaaaaaaaaaaugcaucccccccccccccccccccccccccccccccaaaggcucuuuucagagccaccagaauu

SEQ ID NO: 20670 - RNA, 1128 nt, Artificial Sequence
  mRNA product Design b-5 comprising derived and/or modified sequence from HRSV(Memphis-37)__AIY60637.1__P (opt11)
gggagacuccugucgggcggaaguaggaggaguagaguuuaaaaacaguacucuuuuuccgguucgggacguaguugaagcaacgacaagccggauaaccgcucuugagacaggaagcuuaccauggaaaaauucgccccagaauuucacggcgaagacgccaacaaccgagccaccaaauuccucgaaucaauaaaaggcaaauucacaucccccaaagaccccaaaaaaaaagacucgaucaucuccgugaacucaaucgacauagaagucaccaaagaaagccccaucaccuccaacagcaccaucaucaaccccacaaacgaaacagacgacaccgccggcaacaaaccaaacuaccaacgaaaaccccucgucagcuucaaagaagaccccacaccaagcgacaaccccuucuccaaacucuacaaagaaacaauagaaaccuucgacaacaacgaagaagaaagcucguacucauacgaagaaaucaacgaccaaaccaacgacaacaucaccgcccgccucgaccgcaucgacgaaaaacucuccgaaauccucggaaugcuccacacacucgucgucgccagcgccggccccaccucagcccgggacggcauccgcgacgccauggugggccuccgcgaggaaaugaucgaaaaaauccgcacagaagcccucaugaccaacgaccgccucgaagccauggcccgccuccgcaacgaagaauccgaaaaaauggccaaagacaccuccgacgaagucucacuaaaccccaccuccgaaaaacuaaacaaccuccuagaaggcaacgacagcgacaacgaccucucccuagaagacuucuaaggacuaguacuggcugcaucucccuuuccucuguccuccauccuucucccaggauggugaagggggaccugguacccagugauccccaccccaggauccuaaaucaugacuuaccugcuaauaaaaacucauuggaaaagugagaagaucuaaaaaaaaaaaaaaaaaaaaaaaaaaaaaaaaaaaaaaaaaaaaaaaaaaaaaaaaaaaaaaaaugcaucccccccccccccccccccccccccccccccaaaggcucuuuucagagccaccagaauu

SEQ ID NO: 20671 - RNA, 1034 nt, Artificial Sequence
  mRNA product Design c-1 comprising derived and/or modified sequence from HRSV(Memphis-37)__AIY60637.1__P (wt)
gggagaguccgcucagccagguugcagaagcggcuuagcguguguccuaaucuucucucugcguguagguaggccugugccgcaaacaagcuuaccauggaaaaguuugcuccugaauuccauggagaagacgcaaacaacagagccacuaaauuccuagaaucaauaaagggcaaauucacaucaccuaaagaucccaagaaaaaagauaguaucauaucugucaacucaauagauauagaaguaaccaaagaaagcccuauaacuucaaauucaaccauuauaaacccuacaaaugagacagaugauacugcagggaacaagcccaauuaucaaagaaaaccacuagugaguuucaaagaagacccuacgccaagugauaaucccuuuucaaaacuauacaaagaaaccauagaaacauuugauaacaaugaagaagaaucuagcuauucauaugaagaaauaaaugaucagacaaacgauaauauaacagcaagauuagauaggauugaugaaaaauuaagugaaauacuaggaaugcuucacacacuaguaguagcaagugcaggaccuacaucugcucgggaugguauaagagaugccaugguugguuuaagagaagaaaugauagaaaaaaucagaacugaagcauugaugaccaaugauagauuagaagcuauggcaagacucaggaaugaggaaagugaaaagauggcaaaagacacaucagaugaagugucucucaauccaacaucagagaaauugaacaaccuguuggaaggaaaugauagugauaaugaucuaucacuugaagauuucugaggacuaguguccaccugucccuccugggcugcuggauugucucguuuuccugccaaauaaacaggaucagcgcuuuacagaucuaaaaaaaaaaaaaaaaaaaaaaaaaaaaaaaaaaaaaaaaaaaaaaaaaaaaaaaaaaaaaaaaugcaucccccccccccccccccccccccccccccccaaaggcucuuuucagagccaccagaauu

SEQ ID NO: 20672 - RNA, 1034 nt, Artificial Sequence
  mRNA product Design c-1 comprising derived and/or modified sequence from HRSV(Memphis-37)__AIY60637.1__P (opt1)
gggagaguccgcucagccagguugcagaagcggcuuagcguguguccuaaucuucucucugcguguagguaggccugugccgcaaacaagcuuaccauggagaaguucgcccccgaguuccacggcgaggacgccaacaaccgcgcgaccaaguuccuggagagcaucaaggggaaguucaccuccccgaaggaccccaagaagaaggacagcaucaucuccgugaacagcaucgacaucgaggucacgaaggagucccccaucaccagcaacuccaccaucaucaaccccaccaacgagacggacgacaccgccggcaacaagccgaacuaccagcggaagccccucgugagcuucaaggaggaccccacccccuccgacaacccguucagcaagcuguacaaggagaccaucgagacguucgacaacaacgaggaggaguccagcuacuccuacgaggagaucaacgaccagaccaacgacaacaucaccgcccgccuggaccggaucgacgagaagcucagcgagauccuggggaugcugcacacccucguggucgccuccgccggccccacgagcgcgcgcgacgggauccgggacgccauggugggccugcgcgaggagaugaucgagaagauccggaccgaggcccugaugaccaacgaccgccucgaggccauggcgcggcugcgcaacgaggaguccgagaagauggccaaggacaccagcgacgaggugucccugaaccccacgagcgagaagcucaacaaccugcuggagggcaacgacagcgacaacgaccucucccuggaggacuucugaggacuaguguccaccugucccuccugggcugcuggauugucucguuuuccugccaaauaaacaggaucagcgcuuuacagaucuaaaaaaaaaaaaaaaaaaaaaaaaaaaaaaaaaaaaaaaaaaaaaaaaaaaaaaaaaaaaaaaaugcaucccccccccccccccccccccccccccccccaaaggcucuuuucagagccaccagaauu

SEQ ID NO: 20673 - RNA, 1034 nt, Artificial Sequence
  mRNA product Design c-1 comprising derived and/or modified sequence from HRSV(Memphis-37)__AIY60637.1__P (opt2)
gggagaguccgcucagccagguugcagaagcggcuuagcguguguccuaaucuucucucugcguguagguaggccugugccgcaaacaagcuuaccauggagaaguucgcccccgaguuccacggcgaggacgccaacaaccgcgccaccaaguuccucgaguccaucaagggcaaguucaccucccccaaggaccccaagaagaaggacuccaucaucuccgucaacuccaucgacaucgaggucaccaaggagucccccaucaccuccaacuccaccaucaucaaccccaccaacgagaccgacgacaccgccggcaacaagcccaacuaccagcgcaagccccucgucuccuucaaggaggaccccacccccuccgacaaccccuucuccaagcucuacaaggagaccaucgagaccuucgacaacaacgaggaggaguccuccuacuccuacgaggagaucaacgaccagaccaacgacaacaucaccgcccgccucgaccgcaucgacgagaagcucuccgagauccucggcaugcuccacacccucgucgucgccuccgccggccccaccuccgcccgcgacggcauccgcgacgccauggucggccuccgcgaggagaugaucgagaagauccgcaccgaggcccucaugaccaacgaccgccucgaggccauggcccgccuccgcaacgaggaguccgagaagauggccaaggacaccuccgacgaggucucccucaaccccaccuccgagaagcucaacaaccuccucgagggcaacgacuccgacaacgaccucucccucgaggacuucugaggacuaguguccaccugucccuccugggcugcuggauugucucguuuuccugccaaauaaacaggaucagcgcuuuacagaucuaaaaaaaaaaaaaaaaaaaaaaaaaaaaaaaaaaaaaaaaaaaaaaaaaaaaaaaaaaaaaaaaugcaucccccccccccccccccccccccccccccccaaaggcucuuuucagagccaccagaauu

SEQ ID NO: 20674 - RNA, 1034 nt, Artificial Sequence
  mRNA product Design c-1 comprising derived and/or modified sequence from HRSV(Memphis-37)__AIY60637.1__P (opt3)
gggagaguccgcucagccagguugcagaagcggcuuagcguguguccuaaucuucucucugcguguagguaggccugugccgcaaacaagcuuaccauggagaaguucgcccccgaauuucacggcgaggacgcuaacaauagagcaaccaaauuccuggaaagcaucaaggggaaauuuacauccccuaaggauccgaaaaagaaggacucuauuauaucagugaacaguaucgauauugaggucacuaaagaaagcccaaucacguccaauucuaccauuaucaaccccacaaaugagacugacgauaccgccggaaacaagccuaauuaccagaggaaaccacucguuucguucaaggaggaccccacaccuucagauaacccauuuagcaaacuuuauaaggaaaccauagagacuuucgacaauaacgaagaggagaguuccuacucuuaugaagagaucaaugaucaaacaaacgacaauauuaccgcgcggcuggaucgcaucgacgaaaaguugagcgagauuuuagguaugcugcauacgcuagugguagcuuccgccggccccacuucagcacgagaugggauccgugacgccauggugggacucagagaagagaugauagagaaaauuaggaccgaagcucugaugacaaacgaccggcuugaggcaauggcccgccugagaaaugaagagagugaaaagauggcuaaagauacuagcgacgaggucucuuugaacccuaccuccgagaagcucaacaaucugcuggaaggcaacgauucagacaaugaucucagcuuagaggacuuuugaggacuaguguccaccugucccuccugggcugcuggauugucucguuuuccugccaaauaaacaggaucagcgcuuuacagaucuaaaaaaaaaaaaaaaaaaaaaaaaaaaaaaaaaaaaaaaaaaaaaaaaaaaaaaaaaaaaaaaaugcaucccccccccccccccccccccccccccccccaaaggcucuuuucagagccaccagaauu

SEQ ID NO: 20675 - RNA, 1034 nt, Artificial Sequence
  mRNA product Design c-1 comprising derived and/or modified sequence from HRSV(Memphis-37)__AIY60637.1__P (opt4)
gggagaguccgcucagccagguugcagaagcggcuuagcguguguccuaaucuucucucugcguguagguaggccugugccgcaaacaagcuuaccauggagaaguucgcccccgaguuccacggcgaggacgccaacaacagagccaccaaguuccuggagagcaucaagggcaaguucaccagccccaaggaccccaagaagaaggacagcaucaucagcgugaacagcaucgacaucgaggugaccaaggagagccccaucaccagcaacagcaccaucaucaaccccaccaacgagaccgacgacaccgccggcaacaagcccaacuaccagagaaagccccuggugagcuucaaggaggaccccacccccagcgacaaccccuucagcaagcuguacaaggagaccaucgagaccuucgacaacaacgaggaggagagcagcuacagcuacgaggagaucaacgaccagaccaacgacaacaucaccgccagacuggacagaaucgacgagaagcugagcgagauccugggcaugcugcacacccuggugguggccagcgccggccccaccagcgccagagacggcaucagagacgccauggugggccugagagaggagaugaucgagaagaucagaaccgaggcccugaugaccaacgacagacuggaggccauggccagacugagaaacgaggagagcgagaagauggccaaggacaccagcgacgaggugagccugaaccccaccagcgagaagcugaacaaccugcuggagggcaacgacagcgacaacgaccugagccuggaggacuucugaggacuaguguccaccugucccuccugggcugcuggauugucucguuuuccugccaaauaaacaggaucagcgcuuuacagaucuaaaaaaaaaaaaaaaaaaaaaaaaaaaaaaaaaaaaaaaaaaaaaaaaaaaaaaaaaaaaaaaaugcaucccccccccccccccccccccccccccccccaaaggcucuuuucagagccaccagaauu

SEQ ID NO: 20676 - RNA, 1034 nt, Artificial Sequence
  mRNA product Design c-1 comprising derived and/or modified sequence from HRSV(Memphis-37)__AIY60637.1__P (opt5)
gggagaguccgcucagccagguugcagaagcggcuuagcguguguccuaaucuucucucugcguguagguaggccugugccgcaaacaagcuuaccauggagaaguucgcccccgaauuucacggcgaggacgcuaacaauagagccaccaaauuccuggaaagcaucaaggggaaauuuacauccccuaaggauccgaaaaagaaggacucuauuaucagcgugaacuccauugauaucgaggucacgaaagaaucucccauuaccagcaauuccacaaucaucaacccuaccaaugagacagacgauaccgcgggaaacaagcccaauuaccagcggaaaccucucguuucuuucaaggaggaccccacaccuagcgauaacccguuuuccaaacuguauaaggaaaccauugagacguucgacaauaacgaagaggagagcucuuacuccuaugaagagaucaaugaucaaaccaacgacaauauuacagcucgccuugauagaaucgacgaaaagcugagcgagauucucggcaugcugcauacccuugugguggccucugccgggcccacauccgcucgggauggaauccgcgacgccauggucggccugagagaagagaugauugagaaaauccggaccgaagcucucaugacgaacgaccgccuggaggccauggcgagacugcggaaugaagagagcgaaaagauggccaaagauacaucugacgaggugucccucaacccuaccagcgagaagcugaacaaucuucuggaagggaacgauuccgacaaugaucucucucuggaggacuuuugaggacuaguguccaccugucccuccugggcugcuggauugucucguuuuccugccaaauaaacaggaucagcgcuuuacagaucuaaaaaaaaaaaaaaaaaaaaaaaaaaaaaaaaaaaaaaaaaaaaaaaaaaaaaaaaaaaaaaaaugcaucccccccccccccccccccccccccccccccaaaggcucuuuucagagccaccagaauu

SEQ ID NO: 20677 - RNA, 1034 nt, Artificial Sequence
  mRNA product Design c-1 comprising derived and/or modified sequence from HRSV(Memphis-37)__AIY60637.1__P (opt6)
gggagaguccgcucagccagguugcagaagcggcuuagcguguguccuaaucuucucucugcguguagguaggccugugccgcaaacaagcuuaccauggaaaaauucgcaccagaauuccacggagaagacgcaaacaacagagcaacaaaauuccuagaaucaauaaaaggaaaauucacaagcccaaaagaucccaaaaaaaaagacucaaucauaagcguaaacucaauagauauagaaguaacaaaagaaaguccaauaacaagcaacaguacaauaauaaacccaacaaaugaaacagacgauacagcaggcaacaaaccaaacuaccaaagaaaaccgcuaguaaguuucaaagaagacccaacaccaagcgauaacccauuuucaaaauuauacaaagaaacaauagaaacauucgacaacaacgaagaagaaagcucauacucauacgaagaaauaaacgaccaaacaaacgacaacauaacagcgagauuagacagaauagacgaaaaacuaucagaaauacuaggcauguuacacacauuaguaguagcaagcgcaggaccaacaucagcaagagacggaauccgagacgcaaugguaggacuaagagaagaaaugauagaaaaaauaagaacagaagcacuaaugacaaacgacagacuagaagccauggcaagacuaagaaacgaagaaucagaaaaaauggcaaaagacacaucagacgaaguaucacuaaacccaacaagcgaaaaacuaaacaaccuauuagaaggaaacgacagcgacaacgaccuaucacucgaagacuucuaaggacuaguguccaccugucccuccugggcugcuggauugucucguuuuccugccaaauaaacaggaucagcgcuuuacagaucuaaaaaaaaaaaaaaaaaaaaaaaaaaaaaaaaaaaaaaaaaaaaaaaaaaaaaaaaaaaaaaaaugcaucccccccccccccccccccccccccccccccaaaggcucuuuucagagccaccagaauu

SEQ ID NO: 20678 - RNA, 1034 nt, Artificial Sequence
  mRNA product Design c-1 comprising derived and/or modified sequence from HRSV(Memphis-37)__AIY60637.1__P (opt11)
gggagaguccgcucagccagguugcagaagcggcuuagcguguguccuaaucuucucucugcguguagguaggccugugccgcaaacaagcuuaccauggaaaaauucgccccagaauuucacggcgaagacgccaacaaccgagccaccaaauuccucgaaucaauaaaaggcaaauucacaucccccaaagaccccaaaaaaaaagacucgaucaucuccgugaacucaaucgacauagaagucaccaaagaaagccccaucaccuccaacagcaccaucaucaaccccacaaacgaaacagacgacaccgccggcaacaaaccaaacuaccaacgaaaaccccucgucagcuucaaagaagaccccacaccaagcgacaaccccuucuccaaacucuacaaagaaacaauagaaaccuucgacaacaacgaagaagaaagcucguacucauacgaagaaaucaacgaccaaaccaacgacaacaucaccgcccgccucgaccgcaucgacgaaaaacucuccgaaauccucggaaugcuccacacacucgucgucgccagcgccggccccaccucagcccgggacggcauccgcgacgccauggugggccuccgcgaggaaaugaucgaaaaaauccgcacagaagcccucaugaccaacgaccgccucgaagccauggcccgccuccgcaacgaagaauccgaaaaaauggccaaagacaccuccgacgaagucucacuaaaccccaccuccgaaaaacuaaacaaccuccuagaaggcaacgacagcgacaacgaccucucccuagaagacuucuaaggacuaguguccaccugucccuccugggcugcuggauugucucguuuuccugccaaauaaacaggaucagcgcuuuacagaucuaaaaaaaaaaaaaaaaaaaaaaaaaaaaaaaaaaaaaaaaaaaaaaaaaaaaaaaaaaaaaaaaugcaucccccccccccccccccccccccccccccccaaaggcucuuuucagagccaccagaauu

SEQ ID NO: 20679 - RNA, 1124 nt, Artificial Sequence
  mRNA product Design c-2 comprising derived and/or modified sequence from HRSV(Memphis-37)__AIY60637.1__P (wt)
gggagacuccugucgggcggaaguaggaggaguagaguuuaaaaacaguacucuuuuuccgguucgggacguaguugaagcaacgacaagccggauaaccgcucuugagacaggaagcuuaccauggaaaaguuugcuccugaauuccauggagaagacgcaaacaacagagccacuaaauuccuagaaucaauaaagggcaaauucacaucaccuaaagaucccaagaaaaaagauaguaucauaucugucaacucaauagauauagaaguaaccaaagaaagcccuauaacuucaaauucaaccauuauaaacccuacaaaugagacagaugauacugcagggaacaagcccaauuaucaaagaaaaccacuagugaguuucaaagaagacccuacgccaagugauaaucccuuuucaaaacuauacaaagaaaccauagaaacauuugauaacaaugaagaagaaucuagcuauucauaugaagaaauaaaugaucagacaaacgauaauauaacagcaagauuagauaggauugaugaaaaauuaagugaaauacuaggaaugcuucacacacuaguaguagcaagugcaggaccuacaucugcucgggaugguauaagagaugccaugguugguuuaagagaagaaaugauagaaaaaaucagaacugaagcauugaugaccaaugauagauuagaagcuauggcaagacucaggaaugaggaaagugaaaagauggcaaaagacacaucagaugaagugucucucaauccaacaucagagaaauugaacaaccuguuggaaggaaaugauagugauaaugaucuaucacuugaagauuucugaggacuaguggaagcauuuuccuggcugauuaaaagaaauuacucagcuauggucaucuguuccuguuagaaggcuaugcagcauauuauauacuaugcgcauguuaugaaaugcauaauaaaaaauuuuaaaaaaucuaaaagaucuaaaaaaaaaaaaaaaaaaaaaaaaaaaaaaaaaaaaaaaaaaaaaaaaaaaaaaaaaaaaaaaaugcaucccccccccccccccccccccccccccccccaaaggcucuuuucagagccaccagaauu

SEQ ID NO: 20680 - RNA, 1124 nt, Artificial Sequence
  mRNA product Design c-2 comprising derived and/or modified sequence from HRSV(Memphis-37)__AIY60637.1__P (opt1)
gggagacuccugucgggcggaaguaggaggaguagaguuuaaaaacaguacucuuuuuccgguucgggacguaguugaagcaacgacaagccggauaaccgcucuugagacaggaagcuuaccauggagaaguucgcccccgaguuccacggcgaggacgccaacaaccgcgcgaccaaguuccuggagagcaucaaggggaaguucaccuccccgaaggaccccaagaagaaggacagcaucaucuccgugaacagcaucgacaucgaggucacgaaggagucccccaucaccagcaacuccaccaucaucaaccccaccaacgagacggacgacaccgccggcaacaagccgaacuaccagcggaagccccucgugagcuucaaggaggaccccacccccuccgacaacccguucagcaagcuguacaaggagaccaucgagacguucgacaacaacgaggaggaguccagcuacuccuacgaggagaucaacgaccagaccaacgacaacaucaccgcccgccuggaccggaucgacgagaagcucagcgagauccuggggaugcugcacacccucguggucgccuccgccggccccacgagcgcgcgcgacgggauccgggacgccauggugggccugcgcgaggagaugaucgagaagauccggaccgaggcccugaugaccaacgaccgccucgaggccauggcgcggcugcgcaacgaggaguccgagaagauggccaaggacaccagcgacgaggugucccugaaccccacgagcgagaagcucaacaaccugcuggagggcaacgacagcgacaacgaccucucccuggaggacuucugaggacuaguggaagcauuuuccuggcugauuaaaagaaauuacucagcuauggucaucuguuccuguuagaaggcuaugcagcauauuauauacuaugcgcauguuaugaaaugcauaauaaaaaauuuuaaaaaaucuaaaagaucuaaaaaaaaaaaaaaaaaaaaaaaaaaaaaaaaaaaaaaaaaaaaaaaaaaaaaaaaaaaaaaaaugcaucccccccccccccccccccccccccccccccaaaggcucuuuucagagccaccagaauu

SEQ ID NO: 20681 - RNA, 1124 nt, Artificial Sequence
  mRNA product Design c-2 comprising derived and/or modified sequence from HRSV(Memphis-37)__AIY60637.1__P (opt2)
gggagacuccugucgggcggaaguaggaggaguagaguuuaaaaacaguacucuuuuuccgguucgggacguaguugaagcaacgacaagccggauaaccgcucuugagacaggaagcuuaccauggagaaguucgcccccgaguuccacggcgaggacgccaacaaccgcgccaccaaguuccucgaguccaucaagggcaaguucaccucccccaaggaccccaagaagaaggacuccaucaucuccgucaacuccaucgacaucgaggucaccaaggagucccccaucaccuccaacuccaccaucaucaaccccaccaacgagaccgacgacaccgccggcaacaagcccaacuaccagcgcaagccccucgucuccuucaaggaggaccccacccccuccgacaaccccuucuccaagcucuacaaggagaccaucgagaccuucgacaacaacgaggaggaguccuccuacuccuacgaggagaucaacgaccagaccaacgacaacaucaccgcccgccucgaccgcaucgacgagaagcucuccgagauccucggcaugcuccacacccucgucgucgccuccgccggccccaccuccgcccgcgacggcauccgcgacgccauggucggccuccgcgaggagaugaucgagaagauccgcaccgaggcccucaugaccaacgaccgccucgaggccauggcccgccuccgcaacgaggaguccgagaagauggccaaggacaccuccgacgaggucucccucaaccccaccuccgagaagcucaacaaccuccucgagggcaacgacuccgacaacgaccucucccucgaggacuucugaggacuaguggaagcauuuuccuggcugauuaaaagaaauuacucagcuauggucaucuguuccuguuagaaggcuaugcagcauauuauauacuaugcgcauguuaugaaaugcauaauaaaaaauuuuaaaaaaucuaaaagaucuaaaaaaaaaaaaaaaaaaaaaaaaaaaaaaaaaaaaaaaaaaaaaaaaaaaaaaaaaaaaaaaaugcaucccccccccccccccccccccccccccccccaaaggcucuuuucagagccaccagaauu

SEQ ID NO: 20682 - RNA, 1124 nt, Artificial Sequence
  mRNA product Design c-2 comprising derived and/or modified sequence from HRSV(Memphis-37)__AIY60637.1__P (opt3)
gggagacuccugucgggcggaaguaggaggaguagaguuuaaaaacaguacucuuuuuccgguucgggacguaguugaagcaacgacaagccggauaaccgcucuugagacaggaagcuuaccauggagaaguucgcccccgaauuucacggcgaggacgcuaacaauagagcaaccaaauuccuggaaagcaucaaggggaaauuuacauccccuaaggauccgaaaaagaaggacucuauuauaucagugaacaguaucgauauugaggucacuaaagaaagcccaaucacguccaauucuaccauuaucaaccccacaaaugagacugacgauaccgccggaaacaagccuaauuaccagaggaaaccacucguuucguucaaggaggaccccacaccuucagauaacccauuuagcaaacuuuauaaggaaaccauagagacuuucgacaauaacgaagaggagaguuccuacucuuaugaagagaucaaugaucaaacaaacgacaauauuaccgcgcggcuggaucgcaucgacgaaaaguugagcgagauuuuagguaugcugcauacgcuagugguagcuuccgccggccccacuucagcacgagaugggauccgugacgccauggugggacucagagaagagaugauagagaaaauuaggaccgaagcucugaugacaaacgaccggcuugaggcaauggcccgccugagaaaugaagagagugaaaagauggcuaaagauacuagcgacgaggucucuuugaacccuaccuccgagaagcucaacaaucugcuggaaggcaacgauucagacaaugaucucagcuuagaggacuuuugaggacuaguggaagcauuuuccuggcugauuaaaagaaauuacucagcuauggucaucuguuccuguuagaaggcuaugcagcauauuauauacuaugcgcauguuaugaaaugcauaauaaaaaauuuuaaaaaaucuaaaagaucuaaaaaaaaaaaaaaaaaaaaaaaaaaaaaaaaaaaaaaaaaaaaaaaaaaaaaaaaaaaaaaaaugcaucccccccccccccccccccccccccccccccaaaggcucuuuucagagccaccagaauu

SEQ ID NO: 20683 - RNA, 1124 nt, Artificial Sequence
  mRNA product Design c-2 comprising derived and/or modified sequence from HRSV(Memphis-37)__AIY60637.1__P (opt4)
gggagacuccugucgggcggaaguaggaggaguagaguuuaaaaacaguacucuuuuuccgguucgggacguaguugaagcaacgacaagccggauaaccgcucuugagacaggaagcuuaccauggagaaguucgcccccgaguuccacggcgaggacgccaacaacagagccaccaaguuccuggagagcaucaagggcaaguucaccagccccaaggaccccaagaagaaggacagcaucaucagcgugaacagcaucgacaucgaggugaccaaggagagccccaucaccagcaacagcaccaucaucaaccccaccaacgagaccgacgacaccgccggcaacaagcccaacuaccagagaaagccccuggugagcuucaaggaggaccccacccccagcgacaaccccuucagcaagcuguacaaggagaccaucgagaccuucgacaacaacgaggaggagagcagcuacagcuacgaggagaucaacgaccagaccaacgacaacaucaccgccagacuggacagaaucgacgagaagcugagcgagauccugggcaugcugcacacccuggugguggccagcgccggccccaccagcgccagagacggcaucagagacgccauggugggccugagagaggagaugaucgagaagaucagaaccgaggcccugaugaccaacgacagacuggaggccauggccagacugagaaacgaggagagcgagaagauggccaaggacaccagcgacgaggugagccugaaccccaccagcgagaagcugaacaaccugcuggagggcaacgacagcgacaacgaccugagccuggaggacuucugaggacuaguggaagcauuuuccuggcugauuaaaagaaauuacucagcuauggucaucuguuccuguuagaaggcuaugcagcauauuauauacuaugcgcauguuaugaaaugcauaauaaaaaauuuuaaaaaaucuaaaagaucuaaaaaaaaaaaaaaaaaaaaaaaaaaaaaaaaaaaaaaaaaaaaaaaaaaaaaaaaaaaaaaaaugcaucccccccccccccccccccccccccccccccaaaggcucuuuucagagccaccagaauu

SEQ ID NO: 20684 - RNA, 1124 nt, Artificial Sequence
  mRNA product Design c-2 comprising derived and/or modified sequence from HRSV(Memphis-37)__AIY60637.1__P (opt5)
gggagacuccugucgggcggaaguaggaggaguagaguuuaaaaacaguacucuuuuuccgguucgggacguaguugaagcaacgacaagccggauaaccgcucuugagacaggaagcuuaccauggagaaguucgcccccgaauuucacggcgaggacgcuaacaauagagccaccaaauuccuggaaagcaucaaggggaaauuuacauccccuaaggauccgaaaaagaaggacucuauuaucagcgugaacuccauugauaucgaggucacgaaagaaucucccauuaccagcaauuccacaaucaucaacccuaccaaugagacagacgauaccgcgggaaacaagcccaauuaccagcggaaaccucucguuucuuucaaggaggaccccacaccuagcgauaacccguuuuccaaacuguauaaggaaaccauugagacguucgacaauaacgaagaggagagcucuuacuccuaugaagagaucaaugaucaaaccaacgacaauauuacagcucgccuugauagaaucgacgaaaagcugagcgagauucucggcaugcugcauacccuugugguggccucugccgggcccacauccgcucgggauggaauccgcgacgccauggucggccugagagaagagaugauugagaaaauccggaccgaagcucucaugacgaacgaccgccuggaggccauggcgagacugcggaaugaagagagcgaaaagauggccaaagauacaucugacgaggugucccucaacccuaccagcgagaagcugaacaaucuucuggaagggaacgauuccgacaaugaucucucucuggaggacuuuugaggacuaguggaagcauuuuccuggcugauuaaaagaaauuacucagcuauggucaucuguuccuguuagaaggcuaugcagcauauuauauacuaugcgcauguuaugaaaugcauaauaaaaaauuuuaaaaaaucuaaaagaucuaaaaaaaaaaaaaaaaaaaaaaaaaaaaaaaaaaaaaaaaaaaaaaaaaaaaaaaaaaaaaaaaugcaucccccccccccccccccccccccccccccccaaaggcucuuuucagagccaccagaauu

SEQ ID NO: 20685 - RNA, 1124 nt, Artificial Sequence
  mRNA product Design c-2 comprising derived and/or modified sequence from HRSV(Memphis-37)__AIY60637.1__P (opt6)
gggagacuccugucgggcggaaguaggaggaguagaguuuaaaaacaguacucuuuuuccgguucgggacguaguugaagcaacgacaagccggauaaccgcucuugagacaggaagcuuaccauggaaaaauucgcaccagaauuccacggagaagacgcaaacaacagagcaacaaaauuccuagaaucaauaaaaggaaaauucacaagcccaaaagaucccaaaaaaaaagacucaaucauaagcguaaacucaauagauauagaaguaacaaaagaaaguccaauaacaagcaacaguacaauaauaaacccaacaaaugaaacagacgauacagcaggcaacaaaccaaacuaccaaagaaaaccgcuaguaaguuucaaagaagacccaacaccaagcgauaacccauuuucaaaauuauacaaagaaacaauagaaacauucgacaacaacgaagaagaaagcucauacucauacgaagaaauaaacgaccaaacaaacgacaacauaacagcgagauuagacagaauagacgaaaaacuaucagaaauacuaggcauguuacacacauuaguaguagcaagcgcaggaccaacaucagcaagagacggaauccgagacgcaaugguaggacuaagagaagaaaugauagaaaaaauaagaacagaagcacuaaugacaaacgacagacuagaagccauggcaagacuaagaaacgaagaaucagaaaaaauggcaaaagacacaucagacgaaguaucacuaaacccaacaagcgaaaaacuaaacaaccuauuagaaggaaacgacagcgacaacgaccuaucacucgaagacuucuaaggacuaguggaagcauuuuccuggcugauuaaaagaaauuacucagcuauggucaucuguuccuguuagaaggcuaugcagcauauuauauacuaugcgcauguuaugaaaugcauaauaaaaaauuuuaaaaaaucuaaaagaucuaaaaaaaaaaaaaaaaaaaaaaaaaaaaaaaaaaaaaaaaaaaaaaaaaaaaaaaaaaaaaaaaugcaucccccccccccccccccccccccccccccccaaaggcucuuuucagagccaccagaauu

SEQ ID NO: 20686 - RNA, 1124 nt, Artificial Sequence
  mRNA product Design c-2 comprising derived and/or modified sequence from HRSV(Memphis-37)__AIY60637.1__P (opt11)
gggagacuccugucgggcggaaguaggaggaguagaguuuaaaaacaguacucuuuuuccgguucgggacguaguugaagcaacgacaagccggauaaccgcucuugagacaggaagcuuaccauggaaaaauucgccccagaauuucacggcgaagacgccaacaaccgagccaccaaauuccucgaaucaauaaaaggcaaauucacaucccccaaagaccccaaaaaaaaagacucgaucaucuccgugaacucaaucgacauagaagucaccaaagaaagccccaucaccuccaacagcaccaucaucaaccccacaaacgaaacagacgacaccgccggcaacaaaccaaacuaccaacgaaaaccccucgucagcuucaaagaagaccccacaccaagcgacaaccccuucuccaaacucuacaaagaaacaauagaaaccuucgacaacaacgaagaagaaagcucguacucauacgaagaaaucaacgaccaaaccaacgacaacaucaccgcccgccucgaccgcaucgacgaaaaacucuccgaaauccucggaaugcuccacacacucgucgucgccagcgccggccccaccucagcccgggacggcauccgcgacgccauggugggccuccgcgaggaaaugaucgaaaaaauccgcacagaagcccucaugaccaacgaccgccucgaagccauggcccgccuccgcaacgaagaauccgaaaaaauggccaaagacaccuccgacgaagucucacuaaaccccaccuccgaaaaacuaaacaaccuccuagaaggcaacgacagcgacaacgaccucucccuagaagacuucuaaggacuaguggaagcauuuuccuggcugauuaaaagaaauuacucagcuauggucaucuguuccuguuagaaggcuaugcagcauauuauauacuaugcgcauguuaugaaaugcauaauaaaaaauuuuaaaaaaucuaaaagaucuaaaaaaaaaaaaaaaaaaaaaaaaaaaaaaaaaaaaaaaaaaaaaaaaaaaaaaaaaaaaaaaaugcaucccccccccccccccccccccccccccccccaaaggcucuuuucagagccaccagaauu

SEQ ID NO: 20687 - RNA, 1101 nt, Artificial Sequence
  mRNA product Design c-3 comprising derived and/or modified sequence from HRSV(Memphis-37)__AIY60637.1__P (wt)
gggagaguccgcucagccagguugcagaagcggcuuagcguguguccuaaucuucucucugcguguagguaggccugugccgcaaacaagcuuaccauggaaaaguuugcuccugaauuccauggagaagacgcaaacaacagagccacuaaauuccuagaaucaauaaagggcaaauucacaucaccuaaagaucccaagaaaaaagauaguaucauaucugucaacucaauagauauagaaguaaccaaagaaagcccuauaacuucaaauucaaccauuauaaacccuacaaaugagacagaugauacugcagggaacaagcccaauuaucaaagaaaaccacuagugaguuucaaagaagacccuacgccaagugauaaucccuuuucaaaacuauacaaagaaaccauagaaacauuugauaacaaugaagaagaaucuagcuauucauaugaagaaauaaaugaucagacaaacgauaauauaacagcaagauuagauaggauugaugaaaaauuaagugaaauacuaggaaugcuucacacacuaguaguagcaagugcaggaccuacaucugcucgggaugguauaagagaugccaugguugguuuaagagaagaaaugauagaaaaaaucagaacugaagcauugaugaccaaugauagauuagaagcuauggcaagacucaggaaugaggaaagugaaaagauggcaaaagacacaucagaugaagugucucucaauccaacaucagagaaauugaacaaccuguuggaaggaaaugauagugauaaugaucuaucacuugaagauuucugaggacuaguacuggcugcaucucccuuuccucuguccuccauccuucucccaggauggugaagggggaccugguacccagugauccccaccccaggauccuaaaucaugacuuaccugcuaauaaaaacucauuggaaaagugagaagaucuaaaaaaaaaaaaaaaaaaaaaaaaaaaaaaaaaaaaaaaaaaaaaaaaaaaaaaaaaaaaaaaaugcaucccccccccccccccccccccccccccccccaaaggcucuuuucagagccaccagaauu

SEQ ID NO: 20688 - RNA, 1101 nt, Artificial Sequence
  mRNA product Design c-3 comprising derived and/or modified sequence from HRSV(Memphis-37)__AIY60637.1__P (opt1)
gggagaguccgcucagccagguugcagaagcggcuuagcguguguccuaaucuucucucugcguguagguaggccugugccgcaaacaagcuuaccauggagaaguucgcccccgaguuccacggcgaggacgccaacaaccgcgcgaccaaguuccuggagagcaucaaggggaaguucaccuccccgaaggaccccaagaagaaggacagcaucaucuccgugaacagcaucgacaucgaggucacgaaggagucccccaucaccagcaacuccaccaucaucaaccccaccaacgagacggacgacaccgccggcaacaagccgaacuaccagcggaagccccucgugagcuucaaggaggaccccacccccuccgacaacccguucagcaagcuguacaaggagaccaucgagacguucgacaacaacgaggaggaguccagcuacuccuacgaggagaucaacgaccagaccaacgacaacaucaccgcccgccuggaccggaucgacgagaagcucagcgagauccuggggaugcugcacacccucguggucgccuccgccggccccacgagcgcgcgcgacgggauccgggacgccauggugggccugcgcgaggagaugaucgagaagauccggaccgaggcccugaugaccaacgaccgccucgaggccauggcgcggcugcgcaacgaggaguccgagaagauggccaaggacaccagcgacgaggugucccugaaccccacgagcgagaagcucaacaaccugcuggagggcaacgacagcgacaacgaccucucccuggaggacuucugaggacuaguacuggcugcaucucccuuuccucuguccuccauccuucucccaggauggugaagggggaccugguacccagugauccccaccccaggauccuaaaucaugacuuaccugcuaauaaaaacucauuggaaaagugagaagaucuaaaaaaaaaaaaaaaaaaaaaaaaaaaaaaaaaaaaaaaaaaaaaaaaaaaaaaaaaaaaaaaaugcaucccccccccccccccccccccccccccccccaaaggcucuuuucagagccaccagaauu

SEQ ID NO: 20689 - RNA, 1101 nt, Artificial Sequence
  mRNA product Design c-3 comprising derived and/or modified sequence from HRSV(Memphis-37)__AIY60637.1__P (opt2)
gggagaguccgcucagccagguugcagaagcggcuuagcguguguccuaaucuucucucugcguguagguaggccugugccgcaaacaagcuuaccauggagaaguucgcccccgaguuccacggcgaggacgccaacaaccgcgccaccaaguuccucgaguccaucaagggcaaguucaccucccccaaggaccccaagaagaaggacuccaucaucuccgucaacuccaucgacaucgaggucaccaaggagucccccaucaccuccaacuccaccaucaucaaccccaccaacgagaccgacgacaccgccggcaacaagcccaacuaccagcgcaagccccucgucuccuucaaggaggaccccacccccuccgacaaccccuucuccaagcucuacaaggagaccaucgagaccuucgacaacaacgaggaggaguccuccuacuccuacgaggagaucaacgaccagaccaacgacaacaucaccgcccgccucgaccgcaucgacgagaagcucuccgagauccucggcaugcuccacacccucgucgucgccuccgccggccccaccuccgcccgcgacggcauccgcgacgccauggucggccuccgcgaggagaugaucgagaagauccgcaccgaggcccucaugaccaacgaccgccucgaggccauggcccgccuccgcaacgaggaguccgagaagauggccaaggacaccuccgacgaggucucccucaaccccaccuccgagaagcucaacaaccuccucgagggcaacgacuccgacaacgaccucucccucgaggacuucugaggacuaguacuggcugcaucucccuuuccucuguccuccauccuucucccaggauggugaagggggaccugguacccagugauccccaccccaggauccuaaaucaugacuuaccugcuaauaaaaacucauuggaaaagugagaagaucuaaaaaaaaaaaaaaaaaaaaaaaaaaaaaaaaaaaaaaaaaaaaaaaaaaaaaaaaaaaaaaaaugcaucccccccccccccccccccccccccccccccaaaggcucuuuucagagccaccagaauu

SEQ ID NO: 20690 - RNA, 1101 nt, Artificial Sequence
  mRNA product Design c-3 comprising derived and/or modified sequence from HRSV(Memphis-37)__AIY60637.1__P (opt3)
gggagaguccgcucagccagguugcagaagcggcuuagcguguguccuaaucuucucucugcguguagguaggccugugccgcaaacaagcuuaccauggagaaguucgcccccgaauuucacggcgaggacgcuaacaauagagcaaccaaauuccuggaaagcaucaaggggaaauuuacauccccuaaggauccgaaaaagaaggacucuauuauaucagugaacaguaucgauauugaggucacuaaagaaagcccaaucacguccaauucuaccauuaucaaccccacaaaugagacugacgauaccgccggaaacaagccuaauuaccagaggaaaccacucguuucguucaaggaggaccccacaccuucagauaacccauuuagcaaacuuuauaaggaaaccauagagacuuucgacaauaacgaagaggagaguuccuacucuuaugaagagaucaaugaucaaacaaacgacaauauuaccgcgcggcuggaucgcaucgacgaaaaguugagcgagauuuuagguaugcugcauacgcuagugguagcuuccgccggccccacuucagcacgagaugggauccgugacgccauggugggacucagagaagagaugauagagaaaauuaggaccgaagcucugaugacaaacgaccggcuugaggcaauggcccgccugagaaaugaagagagugaaaagauggcuaaagauacuagcgacgaggucucuuugaacccuaccuccgagaagcucaacaaucugcuggaaggcaacgauucagacaaugaucucagcuuagaggacuuuugaggacuaguacuggcugcaucucccuuuccucuguccuccauccuucucccaggauggugaagggggaccugguacccagugauccccaccccaggauccuaaaucaugacuuaccugcuaauaaaaacucauuggaaaagugagaagaucuaaaaaaaaaaaaaaaaaaaaaaaaaaaaaaaaaaaaaaaaaaaaaaaaaaaaaaaaaaaaaaaaugcaucccccccccccccccccccccccccccccccaaaggcucuuuucagagccaccagaauu

SEQ ID NO: 20691 - RNA, 1101 nt, Artificial Sequence
  mRNA product Design c-3 comprising derived and/or modified sequence from HRSV(Memphis-37)__AIY60637.1__P (opt4)
gggagaguccgcucagccagguugcagaagcggcuuagcguguguccuaaucuucucucugcguguagguaggccugugccgcaaacaagcuuaccauggagaaguucgcccccgaguuccacggcgaggacgccaacaacagagccaccaaguuccuggagagcaucaagggcaaguucaccagccccaaggaccccaagaagaaggacagcaucaucagcgugaacagcaucgacaucgaggugaccaaggagagccccaucaccagcaacagcaccaucaucaaccccaccaacgagaccgacgacaccgccggcaacaagcccaacuaccagagaaagccccuggugagcuucaaggaggaccccacccccagcgacaaccccuucagcaagcuguacaaggagaccaucgagaccuucgacaacaacgaggaggagagcagcuacagcuacgaggagaucaacgaccagaccaacgacaacaucaccgccagacuggacagaaucgacgagaagcugagcgagauccugggcaugcugcacacccuggugguggccagcgccggccccaccagcgccagagacggcaucagagacgccauggugggccugagagaggagaugaucgagaagaucagaaccgaggcccugaugaccaacgacagacuggaggccauggccagacugagaaacgaggagagcgagaagauggccaaggacaccagcgacgaggugagccugaaccccaccagcgagaagcugaacaaccugcuggagggcaacgacagcgacaacgaccugagccuggaggacuucugaggacuaguacuggcugcaucucccuuuccucuguccuccauccuucucccaggauggugaagggggaccugguacccagugauccccaccccaggauccuaaaucaugacuuaccugcuaauaaaaacucauuggaaaagugagaagaucuaaaaaaaaaaaaaaaaaaaaaaaaaaaaaaaaaaaaaaaaaaaaaaaaaaaaaaaaaaaaaaaaugcaucccccccccccccccccccccccccccccccaaaggcucuuuucagagccaccagaauu

SEQ ID NO: 20692 - RNA, 1101 nt, Artificial Sequence
  mRNA product Design c-3 comprising derived and/or modified sequence from HRSV(Memphis-37)__AIY60637.1__P (opt5)
gggagaguccgcucagccagguugcagaagcggcuuagcguguguccuaaucuucucucugcguguagguaggccugugccgcaaacaagcuuaccauggagaaguucgcccccgaauuucacggcgaggacgcuaacaauagagccaccaaauuccuggaaagcaucaaggggaaauuuacauccccuaaggauccgaaaaagaaggacucuauuaucagcgugaacuccauugauaucgaggucacgaaagaaucucccauuaccagcaauuccacaaucaucaacccuaccaaugagacagacgauaccgcgggaaacaagcccaauuaccagcggaaaccucucguuucuuucaaggaggaccccacaccuagcgauaacccguuuuccaaacuguauaaggaaaccauugagacguucgacaauaacgaagaggagagcucuuacuccuaugaagagaucaaugaucaaaccaacgacaauauuacagcucgccuugauagaaucgacgaaaagcugagcgagauucucggcaugcugcauacccuugugguggccucugccgggcccacauccgcucgggauggaauccgcgacgccauggucggccugagagaagagaugauugagaaaauccggaccgaagcucucaugacgaacgaccgccuggaggccauggcgagacugcggaaugaagagagcgaaaagauggccaaagauacaucugacgaggugucccucaacccuaccagcgagaagcugaacaaucuucuggaagggaacgauuccgacaaugaucucucucuggaggacuuuugaggacuaguacuggcugcaucucccuuuccucuguccuccauccuucucccaggauggugaagggggaccugguacccagugauccccaccccaggauccuaaaucaugacuuaccugcuaauaaaaacucauuggaaaagugagaagaucuaaaaaaaaaaaaaaaaaaaaaaaaaaaaaaaaaaaaaaaaaaaaaaaaaaaaaaaaaaaaaaaaugcaucccccccccccccccccccccccccccccccaaaggcucuuuucagagccaccagaauu

SEQ ID NO: 20693 - RNA, 1101 nt, Artificial Sequence
  mRNA product Design c-3 comprising derived and/or modified sequence from HRSV(Memphis-37)__AIY60637.1__P (opt6)
gggagaguccgcucagccagguugcagaagcggcuuagcguguguccuaaucuucucucugcguguagguaggccugugccgcaaacaagcuuaccauggaaaaauucgcaccagaauuccacggagaagacgcaaacaacagagcaacaaaauuccuagaaucaauaaaaggaaaauucacaagcccaaaagaucccaaaaaaaaagacucaaucauaagcguaaacucaauagauauagaaguaacaaaagaaaguccaauaacaagcaacaguacaauaauaaacccaacaaaugaaacagacgauacagcaggcaacaaaccaaacuaccaaagaaaaccgcuaguaaguuucaaagaagacccaacaccaagcgauaacccauuuucaaaauuauacaaagaaacaauagaaacauucgacaacaacgaagaagaaagcucauacucauacgaagaaauaaacgaccaaacaaacgacaacauaacagcgagauuagacagaauagacgaaaaacuaucagaaauacuaggcauguuacacacauuaguaguagcaagcgcaggaccaacaucagcaagagacggaauccgagacgcaaugguaggacuaagagaagaaaugauagaaaaaauaagaacagaagcacuaaugacaaacgacagacuagaagccauggcaagacuaagaaacgaagaaucagaaaaaauggcaaaagacacaucagacgaaguaucacuaaacccaacaagcgaaaaacuaaacaaccuauuagaaggaaacgacagcgacaacgaccuaucacucgaagacuucuaaggacuaguacuggcugcaucucccuuuccucuguccuccauccuucucccaggauggugaagggggaccugguacccagugauccccaccccaggauccuaaaucaugacuuaccugcuaauaaaaacucauuggaaaagugagaagaucuaaaaaaaaaaaaaaaaaaaaaaaaaaaaaaaaaaaaaaaaaaaaaaaaaaaaaaaaaaaaaaaaugcaucccccccccccccccccccccccccccccccaaaggcucuuuucagagccaccagaauu

SEQ ID NO: 20694 - RNA, 1101 nt, Artificial Sequence
  mRNA product Design c-3 comprising derived and/or modified sequence from HRSV(Memphis-37)__AIY60637.1__P (opt11)
gggagaguccgcucagccagguugcagaagcggcuuagcguguguccuaaucuucucucugcguguagguaggccugugccgcaaacaagcuuaccauggaaaaauucgccccagaauuucacggcgaagacgccaacaaccgagccaccaaauuccucgaaucaauaaaaggcaaauucacaucccccaaagaccccaaaaaaaaagacucgaucaucuccgugaacucaaucgacauagaagucaccaaagaaagccccaucaccuccaacagcaccaucaucaaccccacaaacgaaacagacgacaccgccggcaacaaaccaaacuaccaacgaaaaccccucgucagcuucaaagaagaccccacaccaagcgacaaccccuucuccaaacucuacaaagaaacaauagaaaccuucgacaacaacgaagaagaaagcucguacucauacgaagaaaucaacgaccaaaccaacgacaacaucaccgcccgccucgaccgcaucgacgaaaaacucuccgaaauccucggaaugcuccacacacucgucgucgccagcgccggccccaccucagcccgggacggcauccgcgacgccauggugggccuccgcgaggaaaugaucgaaaaaauccgcacagaagcccucaugaccaacgaccgccucgaagccauggcccgccuccgcaacgaagaauccgaaaaaauggccaaagacaccuccgacgaagucucacuaaaccccaccuccgaaaaacuaaacaaccuccuagaaggcaacgacagcgacaacgaccucucccuagaagacuucuaaggacuaguacuggcugcaucucccuuuccucuguccuccauccuucucccaggauggugaagggggaccugguacccagugauccccaccccaggauccuaaaucaugacuuaccugcuaauaaaaacucauuggaaaagugagaagaucuaaaaaaaaaaaaaaaaaaaaaaaaaaaaaaaaaaaaaaaaaaaaaaaaaaaaaaaaaaaaaaaaugcaucccccccccccccccccccccccccccccccaaaggcucuuuucagagccaccagaauu

SEQ ID NO: 20695 - RNA, 1097 nt, Artificial Sequence
  mRNA product Design c-4 comprising derived and/or modified sequence from HRSV(Memphis-37)__AIY60637.1__P (wt)
gggagaguccgcucagccagguugcagaagcggcuuagcguguguccuaaucuucucucugcguguagguaggccugugccgcaaacaagcuuaccauggaaaaguuugcuccugaauuccauggagaagacgcaaacaacagagccacuaaauuccuagaaucaauaaagggcaaauucacaucaccuaaagaucccaagaaaaaagauaguaucauaucugucaacucaauagauauagaaguaaccaaagaaagcccuauaacuucaaauucaaccauuauaaacccuacaaaugagacagaugauacugcagggaacaagcccaauuaucaaagaaaaccacuagugaguuucaaagaagacccuacgccaagugauaaucccuuuucaaaacuauacaaagaaaccauagaaacauuugauaacaaugaagaagaaucuagcuauucauaugaagaaauaaaugaucagacaaacgauaauauaacagcaagauuagauaggauugaugaaaaauuaagugaaauacuaggaaugcuucacacacuaguaguagcaagugcaggaccuacaucugcucgggaugguauaagagaugccaugguugguuuaagagaagaaaugauagaaaaaaucagaacugaagcauugaugaccaaugauagauuagaagcuauggcaagacucaggaaugaggaaagugaaaagauggcaaaagacacaucagaugaagugucucucaauccaacaucagagaaauugaacaaccuguuggaaggaaaugauagugauaaugaucuaucacuugaagauuucugaggacuaguggaagcauuuuccuggcugauuaaaagaaauuacucagcuauggucaucuguuccuguuagaaggcuaugcagcauauuauauacuaugcgcauguuaugaaaugcauaauaaaaaauuuuaaaaaaucuaaaagaucuaaaaaaaaaaaaaaaaaaaaaaaaaaaaaaaaaaaaaaaaaaaaaaaaaaaaaaaaaaaaaaaaugcaucccccccccccccccccccccccccccccccaaaggcucuuuucagagccaccagaauu

SEQ ID NO: 20696 - RNA, 1097 nt, Artificial Sequence
  mRNA product Design c-4 comprising derived and/or modified sequence from HRSV(Memphis-37)__AIY60637.1__P (opt1)
gggagaguccgcucagccagguugcagaagcggcuuagcguguguccuaaucuucucucugcguguagguaggccugugccgcaaacaagcuuaccauggagaaguucgcccccgaguuccacggcgaggacgccaacaaccgcgcgaccaaguuccuggagagcaucaaggggaaguucaccuccccgaaggaccccaagaagaaggacagcaucaucuccgugaacagcaucgacaucgaggucacgaaggagucccccaucaccagcaacuccaccaucaucaaccccaccaacgagacggacgacaccgccggcaacaagccgaacuaccagcggaagccccucgugagcuucaaggaggaccccacccccuccgacaacccguucagcaagcuguacaaggagaccaucgagacguucgacaacaacgaggaggaguccagcuacuccuacgaggagaucaacgaccagaccaacgacaacaucaccgcccgccuggaccggaucgacgagaagcucagcgagauccuggggaugcugcacacccucguggucgccuccgccggccccacgagcgcgcgcgacgggauccgggacgccauggugggccugcgcgaggagaugaucgagaagauccggaccgaggcccugaugaccaacgaccgccucgaggccauggcgcggcugcgcaacgaggaguccgagaagauggccaaggacaccagcgacgaggugucccugaaccccacgagcgagaagcucaacaaccugcuggagggcaacgacagcgacaacgaccucucccuggaggacuucugaggacuaguggaagcauuuuccuggcugauuaaaagaaauuacucagcuauggucaucuguuccuguuagaaggcuaugcagcauauuauauacuaugcgcauguuaugaaaugcauaauaaaaaauuuuaaaaaaucuaaaagaucuaaaaaaaaaaaaaaaaaaaaaaaaaaaaaaaaaaaaaaaaaaaaaaaaaaaaaaaaaaaaaaaaugcaucccccccccccccccccccccccccccccccaaaggcucuuuucagagccaccagaauu

SEQ ID NO: 20697 - RNA, 1097 nt, Artificial Sequence
  mRNA product Design c-4 comprising derived and/or modified sequence from HRSV(Memphis-37)__AIY60637.1__P (opt2)
gggagaguccgcucagccagguugcagaagcggcuuagcguguguccuaaucuucucucugcguguagguaggccugugccgcaaacaagcuuaccauggagaaguucgcccccgaguuccacggcgaggacgccaacaaccgcgccaccaaguuccucgaguccaucaagggcaaguucaccucccccaaggaccccaagaagaaggacuccaucaucuccgucaacuccaucgacaucgaggucaccaaggagucccccaucaccuccaacuccaccaucaucaaccccaccaacgagaccgacgacaccgccggcaacaagcccaacuaccagcgcaagccccucgucuccuucaaggaggaccccacccccuccgacaaccccuucuccaagcucuacaaggagaccaucgagaccuucgacaacaacgaggaggaguccuccuacuccuacgaggagaucaacgaccagaccaacgacaacaucaccgcccgccucgaccgcaucgacgagaagcucuccgagauccucggcaugcuccacacccucgucgucgccuccgccggccccaccuccgcccgcgacggcauccgcgacgccauggucggccuccgcgaggagaugaucgagaagauccgcaccgaggcccucaugaccaacgaccgccucgaggccauggcccgccuccgcaacgaggaguccgagaagauggccaaggacaccuccgacgaggucucccucaaccccaccuccgagaagcucaacaaccuccucgagggcaacgacuccgacaacgaccucucccucgaggacuucugaggacuaguggaagcauuuuccuggcugauuaaaagaaauuacucagcuauggucaucuguuccuguuagaaggcuaugcagcauauuauauacuaugcgcauguuaugaaaugcauaauaaaaaauuuuaaaaaaucuaaaagaucuaaaaaaaaaaaaaaaaaaaaaaaaaaaaaaaaaaaaaaaaaaaaaaaaaaaaaaaaaaaaaaaaugcaucccccccccccccccccccccccccccccccaaaggcucuuuucagagccaccagaauu

SEQ ID NO: 20698 - RNA, 1097 nt, Artificial Sequence
  mRNA product Design c-4 comprising derived and/or modified sequence from HRSV(Memphis-37)__AIY60637.1__P (opt3)
gggagaguccgcucagccagguugcagaagcggcuuagcguguguccuaaucuucucucugcguguagguaggccugugccgcaaacaagcuuaccauggagaaguucgcccccgaauuucacggcgaggacgcuaacaauagagcaaccaaauuccuggaaagcaucaaggggaaauuuacauccccuaaggauccgaaaaagaaggacucuauuauaucagugaacaguaucgauauugaggucacuaaagaaagcccaaucacguccaauucuaccauuaucaaccccacaaaugagacugacgauaccgccggaaacaagccuaauuaccagaggaaaccacucguuucguucaaggaggaccccacaccuucagauaacccauuuagcaaacuuuauaaggaaaccauagagacuuucgacaauaacgaagaggagaguuccuacucuuaugaagagaucaaugaucaaacaaacgacaauauuaccgcgcggcuggaucgcaucgacgaaaaguugagcgagauuuuagguaugcugcauacgcuagugguagcuuccgccggccccacuucagcacgagaugggauccgugacgccauggugggacucagagaagagaugauagagaaaauuaggaccgaagcucugaugacaaacgaccggcuugaggcaauggcccgccugagaaaugaagagagugaaaagauggcuaaagauacuagcgacgaggucucuuugaacccuaccuccgagaagcucaacaaucugcuggaaggcaacgauucagacaaugaucucagcuuagaggacuuuugaggacuaguggaagcauuuuccuggcugauuaaaagaaauuacucagcuauggucaucuguuccuguuagaaggcuaugcagcauauuauauacuaugcgcauguuaugaaaugcauaauaaaaaauuuuaaaaaaucuaaaagaucuaaaaaaaaaaaaaaaaaaaaaaaaaaaaaaaaaaaaaaaaaaaaaaaaaaaaaaaaaaaaaaaaugcaucccccccccccccccccccccccccccccccaaaggcucuuuucagagccaccagaauu

SEQ ID NO: 20699 - RNA, 1097 nt, Artificial Sequence
  mRNA product Design c-4 comprising derived and/or modified sequence from HRSV(Memphis-37)__AIY60637.1__P (opt4)
gggagaguccgcucagccagguugcagaagcggcuuagcguguguccuaaucuucucucugcguguagguaggccugugccgcaaacaagcuuaccauggagaaguucgcccccgaguuccacggcgaggacgccaacaacagagccaccaaguuccuggagagcaucaagggcaaguucaccagccccaaggaccccaagaagaaggacagcaucaucagcgugaacagcaucgacaucgaggugaccaaggagagccccaucaccagcaacagcaccaucaucaaccccaccaacgagaccgacgacaccgccggcaacaagcccaacuaccagagaaagccccuggugagcuucaaggaggaccccacccccagcgacaaccccuucagcaagcuguacaaggagaccaucgagaccuucgacaacaacgaggaggagagcagcuacagcuacgaggagaucaacgaccagaccaacgacaacaucaccgccagacuggacagaaucgacgagaagcugagcgagauccugggcaugcugcacacccuggugguggccagcgccggccccaccagcgccagagacggcaucagagacgccauggugggccugagagaggagaugaucgagaagaucagaaccgaggcccugaugaccaacgacagacuggaggccauggccagacugagaaacgaggagagcgagaagauggccaaggacaccagcgacgaggugagccugaaccccaccagcgagaagcugaacaaccugcuggagggcaacgacagcgacaacgaccugagccuggaggacuucugaggacuaguggaagcauuuuccuggcugauuaaaagaaauuacucagcuauggucaucuguuccuguuagaaggcuaugcagcauauuauauacuaugcgcauguuaugaaaugcauaauaaaaaauuuuaaaaaaucuaaaagaucuaaaaaaaaaaaaaaaaaaaaaaaaaaaaaaaaaaaaaaaaaaaaaaaaaaaaaaaaaaaaaaaaugcaucccccccccccccccccccccccccccccccaaaggcucuuuucagagccaccagaauu

SEQ ID NO: 20700 - RNA, 1097 nt, Artificial Sequence
  mRNA product Design c-4 comprising derived and/or modified sequence from HRSV(Memphis-37)__AIY60637.1__P (opt5)
gggagaguccgcucagccagguugcagaagcggcuuagcguguguccuaaucuucucucugcguguagguaggccugugccgcaaacaagcuuaccauggagaaguucgcccccgaauuucacggcgaggacgcuaacaauagagccaccaaauuccuggaaagcaucaaggggaaauuuacauccccuaaggauccgaaaaagaaggacucuauuaucagcgugaacuccauugauaucgaggucacgaaagaaucucccauuaccagcaauuccacaaucaucaacccuaccaaugagacagacgauaccgcgggaaacaagcccaauuaccagcggaaaccucucguuucuuucaaggaggaccccacaccuagcgauaacccguuuuccaaacuguauaaggaaaccauugagacguucgacaauaacgaagaggagagcucuuacuccuaugaagagaucaaugaucaaaccaacgacaauauuacagcucgccuugauagaaucgacgaaaagcugagcgagauucucggcaugcugcauacccuugugguggccucugccgggcccacauccgcucgggauggaauccgcgacgccauggucggccugagagaagagaugauugagaaaauccggaccgaagcucucaugacgaacgaccgccuggaggccauggcgagacugcggaaugaagagagcgaaaagauggccaaagauacaucugacgaggugucccucaacccuaccagcgagaagcugaacaaucuucuggaagggaacgauuccgacaaugaucucucucuggaggacuuuugaggacuaguggaagcauuuuccuggcugauuaaaagaaauuacucagcuauggucaucuguuccuguuagaaggcuaugcagcauauuauauacuaugcgcauguuaugaaaugcauaauaaaaaauuuuaaaaaaucuaaaagaucuaaaaaaaaaaaaaaaaaaaaaaaaaaaaaaaaaaaaaaaaaaaaaaaaaaaaaaaaaaaaaaaaugcaucccccccccccccccccccccccccccccccaaaggcucuuuucagagccaccagaauu

SEQ ID NO: 20701 - RNA, 1097 nt, Artificial Sequence
  mRNA product Design c-4 comprising derived and/or modified sequence from HRSV(Memphis-37)__AIY60637.1__P (opt6)
gggagaguccgcucagccagguugcagaagcggcuuagcguguguccuaaucuucucucugcguguagguaggccugugccgcaaacaagcuuaccauggaaaaauucgcaccagaauuccacggagaagacgcaaacaacagagcaacaaaauuccuagaaucaauaaaaggaaaauucacaagcccaaaagaucccaaaaaaaaagacucaaucauaagcguaaacucaauagauauagaaguaacaaaagaaaguccaauaacaagcaacaguacaauaauaaacccaacaaaugaaacagacgauacagcaggcaacaaaccaaacuaccaaagaaaaccgcuaguaaguuucaaagaagacccaacaccaagcgauaacccauuuucaaaauuauacaaagaaacaauagaaacauucgacaacaacgaagaagaaagcucauacucauacgaagaaauaaacgaccaaacaaacgacaacauaacagcgagauuagacagaauagacgaaaaacuaucagaaauacuaggcauguuacacacauuaguaguagcaagcgcaggaccaacaucagcaagagacggaauccgagacgcaaugguaggacuaagagaagaaaugauagaaaaaauaagaacagaagcacuaaugacaaacgacagacuagaagccauggcaagacuaagaaacgaagaaucagaaaaaauggcaaaagacacaucagacgaaguaucacuaaacccaacaagcgaaaaacuaaacaaccuauuagaaggaaacgacagcgacaacgaccuaucacucgaagacuucuaaggacuaguggaagcauuuuccuggcugauuaaaagaaauuacucagcuauggucaucuguuccuguuagaaggcuaugcagcauauuauauacuaugcgcauguuaugaaaugcauaauaaaaaauuuuaaaaaaucuaaaagaucuaaaaaaaaaaaaaaaaaaaaaaaaaaaaaaaaaaaaaaaaaaaaaaaaaaaaaaaaaaaaaaaaugcaucccccccccccccccccccccccccccccccaaaggcucuuuucagagccaccagaauu

SEQ ID NO: 20702 - RNA, 1097 nt, Artificial Sequence
  mRNA product Design c-4 comprising derived and/or modified sequence from HRSV(Memphis-37)__AIY60637.1__P (opt11)
gggagaguccgcucagccagguugcagaagcggcuuagcguguguccuaaucuucucucugcguguagguaggccugugccgcaaacaagcuuaccauggaaaaauucgccccagaauuucacggcgaagacgccaacaaccgagccaccaaauuccucgaaucaauaaaaggcaaauucacaucccccaaagaccccaaaaaaaaagacucgaucaucuccgugaacucaaucgacauagaagucaccaaagaaagccccaucaccuccaacagcaccaucaucaaccccacaaacgaaacagacgacaccgccggcaacaaaccaaacuaccaacgaaaaccccucgucagcuucaaagaagaccccacaccaagcgacaaccccuucuccaaacucuacaaagaaacaauagaaaccuucgacaacaacgaagaagaaagcucguacucauacgaagaaaucaacgaccaaaccaacgacaacaucaccgcccgccucgaccgcaucgacgaaaaacucuccgaaauccucggaaugcuccacacacucgucgucgccagcgccggccccaccucagcccgggacggcauccgcgacgccauggugggccuccgcgaggaaaugaucgaaaaaauccgcacagaagcccucaugaccaacgaccgccucgaagccauggcccgccuccgcaacgaagaauccgaaaaaauggccaaagacaccuccgacgaagucucacuaaaccccaccuccgaaaaacuaaacaaccuccuagaaggcaacgacagcgacaacgaccucucccuagaagacuucuaaggacuaguggaagcauuuuccuggcugauuaaaagaaauuacucagcuauggucaucuguuccuguuagaaggcuaugcagcauauuauauacuaugcgcauguuaugaaaugcauaauaaaaaauuuuaaaaaaucuaaaagaucuaaaaaaaaaaaaaaaaaaaaaaaaaaaaaaaaaaaaaaaaaaaaaaaaaaaaaaaaaaaaaaaaugcaucccccccccccccccccccccccccccccccaaaggcucuuuucagagccaccagaauu

SEQ ID NO: 20703 - RNA, 1015 nt, Artificial Sequence
  mRNA product Design c-5 comprising derived and/or modified sequence from HRSV(Memphis-37)__AIY60637.1__P (wt)
gggagagcggcucggccauuuugucccagucaguccggaggcugcggcugcagaaguaccgccugcggaguaacugcaaagaagcuuaccauggaaaaguuugcuccugaauuccauggagaagacgcaaacaacagagccacuaaauuccuagaaucaauaaagggcaaauucacaucaccuaaagaucccaagaaaaaagauaguaucauaucugucaacucaauagauauagaaguaaccaaagaaagcccuauaacuucaaauucaaccauuauaaacccuacaaaugagacagaugauacugcagggaacaagcccaauuaucaaagaaaaccacuagugaguuucaaagaagacccuacgccaagugauaaucccuuuucaaaacuauacaaagaaaccauagaaacauuugauaacaaugaagaagaaucuagcuauucauaugaagaaauaaaugaucagacaaacgauaauauaacagcaagauuagauaggauugaugaaaaauuaagugaaauacuaggaaugcuucacacacuaguaguagcaagugcaggaccuacaucugcucgggaugguauaagagaugccaugguugguuuaagagaagaaaugauagaaaaaaucagaacugaagcauugaugaccaaugauagauuagaagcuauggcaagacucaggaaugaggaaagugaaaagauggcaaaagacacaucagaugaagugucucucaauccaacaucagagaaauugaacaaccuguuggaaggaaaugauagugauaaugaucuaucacuugaagauuucugaggacuagucccuguucccagagcccacuuuuuuuucuuuuuuugaaauaaaauagccugucuuucagaucuaaaaaaaaaaaaaaaaaaaaaaaaaaaaaaaaaaaaaaaaaaaaaaaaaaaaaaaaaaaaaaaaugcaucccccccccccccccccccccccccccccccaaaggcucuuuucagagccaccagaauu

SEQ ID NO: 20704 - RNA, 1015 nt, Artificial Sequence
  mRNA product Design c-5 comprising derived and/or modified sequence from HRSV(Memphis-37)__AIY60637.1__P (opt1)
gggagagcggcucggccauuuugucccagucaguccggaggcugcggcugcagaaguaccgccugcggaguaacugcaaagaagcuuaccauggagaaguucgcccccgaguuccacggcgaggacgccaacaaccgcgcgaccaaguuccuggagagcaucaaggggaaguucaccuccccgaaggaccccaagaagaaggacagcaucaucuccgugaacagcaucgacaucgaggucacgaaggagucccccaucaccagcaacuccaccaucaucaaccccaccaacgagacggacgacaccgccggcaacaagccgaacuaccagcggaagccccucgugagcuucaaggaggaccccacccccuccgacaacccguucagcaagcuguacaaggagaccaucgagacguucgacaacaacgaggaggaguccagcuacuccuacgaggagaucaacgaccagaccaacgacaacaucaccgcccgccuggaccggaucgacgagaagcucagcgagauccuggggaugcugcacacccucguggucgccuccgccggccccacgagcgcgcgcgacgggauccgggacgccauggugggccugcgcgaggagaugaucgagaagauccggaccgaggcccugaugaccaacgaccgccucgaggccauggcgcggcugcgcaacgaggaguccgagaagauggccaaggacaccagcgacgaggugucccugaaccccacgagcgagaagcucaacaaccugcuggagggcaacgacagcgacaacgaccucucccuggaggacuucugaggacuagucccuguucccagagcccacuuuuuuuucuuuuuuugaaauaaaauagccugucuuucagaucuaaaaaaaaaaaaaaaaaaaaaaaaaaaaaaaaaaaaaaaaaaaaaaaaaaaaaaaaaaaaaaaaugcaucccccccccccccccccccccccccccccccaaaggcucuuuucagagccaccagaauu

SEQ ID NO: 20705 - RNA, 1015 nt, Artificial Sequence
  mRNA product Design c-5 comprising derived and/or modified sequence from HRSV(Memphis-37)__AIY60637.1__P (opt2)
gggagagcggcucggccauuuugucccagucaguccggaggcugcggcugcagaaguaccgccugcggaguaacugcaaagaagcuuaccauggagaaguucgcccccgaguuccacggcgaggacgccaacaaccgcgccaccaaguuccucgaguccaucaagggcaaguucaccucccccaaggaccccaagaagaaggacuccaucaucuccgucaacuccaucgacaucgaggucaccaaggagucccccaucaccuccaacuccaccaucaucaaccccaccaacgagaccgacgacaccgccggcaacaagcccaacuaccagcgcaagccccucgucuccuucaaggaggaccccacccccuccgacaaccccuucuccaagcucuacaaggagaccaucgagaccuucgacaacaacgaggaggaguccuccuacuccuacgaggagaucaacgaccagaccaacgacaacaucaccgcccgccucgaccgcaucgacgagaagcucuccgagauccucggcaugcuccacacccucgucgucgccuccgccggccccaccuccgcccgcgacggcauccgcgacgccauggucggccuccgcgaggagaugaucgagaagauccgcaccgaggcccucaugaccaacgaccgccucgaggccauggcccgccuccgcaacgaggaguccgagaagauggccaaggacaccuccgacgaggucucccucaaccccaccuccgagaagcucaacaaccuccucgagggcaacgacuccgacaacgaccucucccucgaggacuucugaggacuagucccuguucccagagcccacuuuuuuuucuuuuuuugaaauaaaauagccugucuuucagaucuaaaaaaaaaaaaaaaaaaaaaaaaaaaaaaaaaaaaaaaaaaaaaaaaaaaaaaaaaaaaaaaaugcaucccccccccccccccccccccccccccccccaaaggcucuuuucagagccaccagaauu

SEQ ID NO: 20706 - RNA, 1015 nt, Artificial Sequence
  mRNA product Design c-5 comprising derived and/or modified sequence from HRSV(Memphis-37)__AIY60637.1__P (opt3)
gggagagcggcucggccauuuugucccagucaguccggaggcugcggcugcagaaguaccgccugcggaguaacugcaaagaagcuuaccauggagaaguucgcccccgaauuucacggcgaggacgcuaacaauagagcaaccaaauuccuggaaagcaucaaggggaaauuuacauccccuaaggauccgaaaaagaaggacucuauuauaucagugaacaguaucgauauugaggucacuaaagaaagcccaaucacguccaauucuaccauuaucaaccccacaaaugagacugacgauaccgccggaaacaagccuaauuaccagaggaaaccacucguuucguucaaggaggaccccacaccuucagauaacccauuuagcaaacuuuauaaggaaaccauagagacuuucgacaauaacgaagaggagaguuccuacucuuaugaagagaucaaugaucaaacaaacgacaauauuaccgcgcggcuggaucgcaucgacgaaaaguugagcgagauuuuagguaugcugcauacgcuagugguagcuuccgccggccccacuucagcacgagaugggauccgugacgccauggugggacucagagaagagaugauagagaaaauuaggaccgaagcucugaugacaaacgaccggcuugaggcaauggcccgccugagaaaugaagagagugaaaagauggcuaaagauacuagcgacgaggucucuuugaacccuaccuccgagaagcucaacaaucugcuggaaggcaacgauucagacaaugaucucagcuuagaggacuuuugaggacuagucccuguucccagagcccacuuuuuuuucuuuuuuugaaauaaaauagccugucuuucagaucuaaaaaaaaaaaaaaaaaaaaaaaaaaaaaaaaaaaaaaaaaaaaaaaaaaaaaaaaaaaaaaaaugcaucccccccccccccccccccccccccccccccaaaggcucuuuucagagccaccagaauu

SEQ ID NO: 20707 - RNA, 1015 nt, Artificial Sequence
  mRNA product Design c-5 comprising derived and/or modified sequence from HRSV(Memphis-37)__AIY60637.1__P (opt4)
gggagagcggcucggccauuuugucccagucaguccggaggcugcggcugcagaaguaccgccugcggaguaacugcaaagaagcuuaccauggagaaguucgcccccgaguuccacggcgaggacgccaacaacagagccaccaaguuccuggagagcaucaagggcaaguucaccagccccaaggaccccaagaagaaggacagcaucaucagcgugaacagcaucgacaucgaggugaccaaggagagccccaucaccagcaacagcaccaucaucaaccccaccaacgagaccgacgacaccgccggcaacaagcccaacuaccagagaaagccccuggugagcuucaaggaggaccccacccccagcgacaaccccuucagcaagcuguacaaggagaccaucgagaccuucgacaacaacgaggaggagagcagcuacagcuacgaggagaucaacgaccagaccaacgacaacaucaccgccagacuggacagaaucgacgagaagcugagcgagauccugggcaugcugcacacccuggugguggccagcgccggccccaccagcgccagagacggcaucagagacgccauggugggccugagagaggagaugaucgagaagaucagaaccgaggcccugaugaccaacgacagacuggaggccauggccagacugagaaacgaggagagcgagaagauggccaaggacaccagcgacgaggugagccugaaccccaccagcgagaagcugaacaaccugcuggagggcaacgacagcgacaacgaccugagccuggaggacuucugaggacuagucccuguucccagagcccacuuuuuuuucuuuuuuugaaauaaaauagccugucuuucagaucuaaaaaaaaaaaaaaaaaaaaaaaaaaaaaaaaaaaaaaaaaaaaaaaaaaaaaaaaaaaaaaaaugcaucccccccccccccccccccccccccccccccaaaggcucuuuucagagccaccagaauu

SEQ ID NO: 20708 - RNA, 1015 nt, Artificial Sequence
  mRNA product Design c-5 comprising derived and/or modified sequence from HRSV(Memphis-37)__AIY60637.1__P (opt5)
gggagagcggcucggccauuuugucccagucaguccggaggcugcggcugcagaaguaccgccugcggaguaacugcaaagaagcuuaccauggagaaguucgcccccgaauuucacggcgaggacgcuaacaauagagccaccaaauuccuggaaagcaucaaggggaaauuuacauccccuaaggauccgaaaaagaaggacucuauuaucagcgugaacuccauugauaucgaggucacgaaagaaucucccauuaccagcaauuccacaaucaucaacccuaccaaugagacagacgauaccgcgggaaacaagcccaauuaccagcggaaaccucucguuucuuucaaggaggaccccacaccuagcgauaacccguuuuccaaacuguauaaggaaaccauugagacguucgacaauaacgaagaggagagcucuuacuccuaugaagagaucaaugaucaaaccaacgacaauauuacagcucgccuugauagaaucgacgaaaagcugagcgagauucucggcaugcugcauacccuugugguggccucugccgggcccacauccgcucgggauggaauccgcgacgccauggucggccugagagaagagaugauugagaaaauccggaccgaagcucucaugacgaacgaccgccuggaggccauggcgagacugcggaaugaagagagcgaaaagauggccaaagauacaucugacgaggugucccucaacccuaccagcgagaagcugaacaaucuucuggaagggaacgauuccgacaaugaucucucucuggaggacuuuugaggacuagucccuguucccagagcccacuuuuuuuucuuuuuuugaaauaaaauagccugucuuucagaucuaaaaaaaaaaaaaaaaaaaaaaaaaaaaaaaaaaaaaaaaaaaaaaaaaaaaaaaaaaaaaaaaugcaucccccccccccccccccccccccccccccccaaaggcucuuuucagagccaccagaauu

SEQ ID NO: 20709 - RNA, 1015 nt, Artificial Sequence
  mRNA product Design c-5 comprising derived and/or modified sequence from HRSV(Memphis-37)__AIY60637.1__P (opt6)
gggagagcggcucggccauuuugucccagucaguccggaggcugcggcugcagaaguaccgccugcggaguaacugcaaagaagcuuaccauggaaaaauucgcaccagaauuccacggagaagacgcaaacaacagagcaacaaaauuccuagaaucaauaaaaggaaaauucacaagcccaaaagaucccaaaaaaaaagacucaaucauaagcguaaacucaauagauauagaaguaacaaaagaaaguccaauaacaagcaacaguacaauaauaaacccaacaaaugaaacagacgauacagcaggcaacaaaccaaacuaccaaagaaaaccgcuaguaaguuucaaagaagacccaacaccaagcgauaacccauuuucaaaauuauacaaagaaacaauagaaacauucgacaacaacgaagaagaaagcucauacucauacgaagaaauaaacgaccaaacaaacgacaacauaacagcgagauuagacagaauagacgaaaaacuaucagaaauacuaggcauguuacacacauuaguaguagcaagcgcaggaccaacaucagcaagagacggaauccgagacgcaaugguaggacuaagagaagaaaugauagaaaaaauaagaacagaagcacuaaugacaaacgacagacuagaagccauggcaagacuaagaaacgaagaaucagaaaaaauggcaaaagacacaucagacgaaguaucacuaaacccaacaagcgaaaaacuaaacaaccuauuagaaggaaacgacagcgacaacgaccuaucacucgaagacuucuaaggacuagucccuguucccagagcccacuuuuuuuucuuuuuuugaaauaaaauagccugucuuucagaucuaaaaaaaaaaaaaaaaaaaaaaaaaaaaaaaaaaaaaaaaaaaaaaaaaaaaaaaaaaaaaaaaugcaucccccccccccccccccccccccccccccccaaaggcucuuuucagagccaccagaauu

SEQ ID NO: 20710 - RNA, 1015 nt, Artificial Sequence
  mRNA product Design c-5 comprising derived and/or modified sequence from HRSV(Memphis-37)__AIY60637.1__P (opt11)
gggagagcggcucggccauuuugucccagucaguccggaggcugcggcugcagaaguaccgccugcggaguaacugcaaagaagcuuaccauggaaaaauucgccccagaauuucacggcgaagacgccaacaaccgagccaccaaauuccucgaaucaauaaaaggcaaauucacaucccccaaagaccccaaaaaaaaagacucgaucaucuccgugaacucaaucgacauagaagucaccaaagaaagccccaucaccuccaacagcaccaucaucaaccccacaaacgaaacagacgacaccgccggcaacaaaccaaacuaccaacgaaaaccccucgucagcuucaaagaagaccccacaccaagcgacaaccccuucuccaaacucuacaaagaaacaauagaaaccuucgacaacaacgaagaagaaagcucguacucauacgaagaaaucaacgaccaaaccaacgacaacaucaccgcccgccucgaccgcaucgacgaaaaacucuccgaaauccucggaaugcuccacacacucgucgucgccagcgccggccccaccucagcccgggacggcauccgcgacgccauggugggccuccgcgaggaaaugaucgaaaaaauccgcacagaagcccucaugaccaacgaccgccucgaagccauggcccgccuccgcaacgaagaauccgaaaaaauggccaaagacaccuccgacgaagucucacuaaaccccaccuccgaaaaacuaaacaaccuccuagaaggcaacgacagcgacaacgaccucucccuagaagacuucuaaggacuagucccuguucccagagcccacuuuuuuuucuuuuuuugaaauaaaauagccugucuuucagaucuaaaaaaaaaaaaaaaaaaaaaaaaaaaaaaaaaaaaaaaaaaaaaaaaaaaaaaaaaaaaaaaaugcaucccccccccccccccccccccccccccccccaaaggcucuuuucagagccaccagaauu

SEQ ID NO: 20711 - RNA, 1024 nt, Artificial Sequence
  mRNA product Design d-1 comprising derived and/or modified sequence from HRSV(Memphis-37)__AIY60637.1__P (wt)
gggagacccgugacccggaaguuguacggcuacgcgacuuucccucccacaaacccucgcgcccuuccuuuccuacuugggcccggcagaaagcuuaccauggaaaaguuugcuccugaauuccauggagaagacgcaaacaacagagccacuaaauuccuagaaucaauaaagggcaaauucacaucaccuaaagaucccaagaaaaaagauaguaucauaucugucaacucaauagauauagaaguaaccaaagaaagcccuauaacuucaaauucaaccauuauaaacccuacaaaugagacagaugauacugcagggaacaagcccaauuaucaaagaaaaccacuagugaguuucaaagaagacccuacgccaagugauaaucccuuuucaaaacuauacaaagaaaccauagaaacauuugauaacaaugaagaagaaucuagcuauucauaugaagaaauaaaugaucagacaaacgauaauauaacagcaagauuagauaggauugaugaaaaauuaagugaaauacuaggaaugcuucacacacuaguaguagcaagugcaggaccuacaucugcucgggaugguauaagagaugccaugguugguuuaagagaagaaaugauagaaaaaaucagaacugaagcauugaugaccaaugauagauuagaagcuauggcaagacucaggaaugaggaaagugaaaagauggcaaaagacacaucagaugaagugucucucaauccaacaucagagaaauugaacaaccuguuggaaggaaaugauagugauaaugaucuaucacuugaagauuucugaggacuagucccuguucccagagcccacuuuuuuuucuuuuuuugaaauaaaauagccugucuuucagaucuaaaaaaaaaaaaaaaaaaaaaaaaaaaaaaaaaaaaaaaaaaaaaaaaaaaaaaaaaaaaaaaaugcaucccccccccccccccccccccccccccccccaaaggcucuuuucagagccaccagaauu

SEQ ID NO: 20712 - RNA, 1024 nt, Artificial Sequence
  mRNA product Design d-1 comprising derived and/or modified sequence from HRSV(Memphis-37)__AIY60637.1__P (opt1)
gggagacccgugacccggaaguuguacggcuacgcgacuuucccucccacaaacccucgcgcccuuccuuuccuacuugggcccggcagaaagcuuaccauggagaaguucgcccccgaguuccacggcgaggacgccaacaaccgcgcgaccaaguuccuggagagcaucaaggggaaguucaccuccccgaaggaccccaagaagaaggacagcaucaucuccgugaacagcaucgacaucgaggucacgaaggagucccccaucaccagcaacuccaccaucaucaaccccaccaacgagacggacgacaccgccggcaacaagccgaacuaccagcggaagccccucgugagcuucaaggaggaccccacccccuccgacaacccguucagcaagcuguacaaggagaccaucgagacguucgacaacaacgaggaggaguccagcuacuccuacgaggagaucaacgaccagaccaacgacaacaucaccgcccgccuggaccggaucgacgagaagcucagcgagauccuggggaugcugcacacccucguggucgccuccgccggccccacgagcgcgcgcgacgggauccgggacgccauggugggccugcgcgaggagaugaucgagaagauccggaccgaggcccugaugaccaacgaccgccucgaggccauggcgcggcugcgcaacgaggaguccgagaagauggccaaggacaccagcgacgaggugucccugaaccccacgagcgagaagcucaacaaccugcuggagggcaacgacagcgacaacgaccucucccuggaggacuucugaggacuagucccuguucccagagcccacuuuuuuuucuuuuuuugaaauaaaauagccugucuuucagaucuaaaaaaaaaaaaaaaaaaaaaaaaaaaaaaaaaaaaaaaaaaaaaaaaaaaaaaaaaaaaaaaaugcaucccccccccccccccccccccccccccccccaaaggcucuuuucagagccaccagaauu

SEQ ID NO: 20713 - RNA, 1024 nt, Artificial Sequence
  mRNA product Design d-1 comprising derived and/or modified sequence from HRSV(Memphis-37)__AIY60637.1__P (opt2)
gggagacccgugacccggaaguuguacggcuacgcgacuuucccucccacaaacccucgcgcccuuccuuuccuacuugggcccggcagaaagcuuaccauggagaaguucgcccccgaguuccacggcgaggacgccaacaaccgcgccaccaaguuccucgaguccaucaagggcaaguucaccucccccaaggaccccaagaagaaggacuccaucaucuccgucaacuccaucgacaucgaggucaccaaggagucccccaucaccuccaacuccaccaucaucaaccccaccaacgagaccgacgacaccgccggcaacaagcccaacuaccagcgcaagccccucgucuccuucaaggaggaccccacccccuccgacaaccccuucuccaagcucuacaaggagaccaucgagaccuucgacaacaacgaggaggaguccuccuacuccuacgaggagaucaacgaccagaccaacgacaacaucaccgcccgccucgaccgcaucgacgagaagcucuccgagauccucggcaugcuccacacccucgucgucgccuccgccggccccaccuccgcccgcgacggcauccgcgacgccauggucggccuccgcgaggagaugaucgagaagauccgcaccgaggcccucaugaccaacgaccgccucgaggccauggcccgccuccgcaacgaggaguccgagaagauggccaaggacaccuccgacgaggucucccucaaccccaccuccgagaagcucaacaaccuccucgagggcaacgacuccgacaacgaccucucccucgaggacuucugaggacuagucccuguucccagagcccacuuuuuuuucuuuuuuugaaauaaaauagccugucuuucagaucuaaaaaaaaaaaaaaaaaaaaaaaaaaaaaaaaaaaaaaaaaaaaaaaaaaaaaaaaaaaaaaaaugcaucccccccccccccccccccccccccccccccaaaggcucuuuucagagccaccagaauu

SEQ ID NO: 20714 - RNA, 1024 nt, Artificial Sequence
  mRNA product Design d-1 comprising derived and/or modified sequence from HRSV(Memphis-37)__AIY60637.1__P (opt3)
gggagacccgugacccggaaguuguacggcuacgcgacuuucccucccacaaacccucgcgcccuuccuuuccuacuugggcccggcagaaagcuuaccauggagaaguucgcccccgaauuucacggcgaggacgcuaacaauagagcaaccaaauuccuggaaagcaucaaggggaaauuuacauccccuaaggauccgaaaaagaaggacucuauuauaucagugaacaguaucgauauugaggucacuaaagaaagcccaaucacguccaauucuaccauuaucaaccccacaaaugagacugacgauaccgccggaaacaagccuaauuaccagaggaaaccacucguuucguucaaggaggaccccacaccuucagauaacccauuuagcaaacuuuauaaggaaaccauagagacuuucgacaauaacgaagaggagaguuccuacucuuaugaagagaucaaugaucaaacaaacgacaauauuaccgcgcggcuggaucgcaucgacgaaaaguugagcgagauuuuagguaugcugcauacgcuagugguagcuuccgccggccccacuucagcacgagaugggauccgugacgccauggugggacucagagaagagaugauagagaaaauuaggaccgaagcucugaugacaaacgaccggcuugaggcaauggcccgccugagaaaugaagagagugaaaagauggcuaaagauacuagcgacgaggucucuuugaacccuaccuccgagaagcucaacaaucugcuggaaggcaacgauucagacaaugaucucagcuuagaggacuuuugaggacuagucccuguucccagagcccacuuuuuuuucuuuuuuugaaauaaaauagccugucuuucagaucuaaaaaaaaaaaaaaaaaaaaaaaaaaaaaaaaaaaaaaaaaaaaaaaaaaaaaaaaaaaaaaaaugcaucccccccccccccccccccccccccccccccaaaggcucuuuucagagccaccagaauu

SEQ ID NO: 20715 - RNA, 1024 nt, Artificial Sequence
  mRNA product Design d-1 comprising derived and/or modified sequence from HRSV(Memphis-37)__AIY60637.1__P (opt4)
gggagacccgugacccggaaguuguacggcuacgcgacuuucccucccacaaacccucgcgcccuuccuuuccuacuugggcccggcagaaagcuuaccauggagaaguucgcccccgaguuccacggcgaggacgccaacaacagagccaccaaguuccuggagagcaucaagggcaaguucaccagccccaaggaccccaagaagaaggacagcaucaucagcgugaacagcaucgacaucgaggugaccaaggagagccccaucaccagcaacagcaccaucaucaaccccaccaacgagaccgacgacaccgccggcaacaagcccaacuaccagagaaagccccuggugagcuucaaggaggaccccacccccagcgacaaccccuucagcaagcuguacaaggagaccaucgagaccuucgacaacaacgaggaggagagcagcuacagcuacgaggagaucaacgaccagaccaacgacaacaucaccgccagacuggacagaaucgacgagaagcugagcgagauccugggcaugcugcacacccuggugguggccagcgccggccccaccagcgccagagacggcaucagagacgccauggugggccugagagaggagaugaucgagaagaucagaaccgaggcccugaugaccaacgacagacuggaggccauggccagacugagaaacgaggagagcgagaagauggccaaggacaccagcgacgaggugagccugaaccccaccagcgagaagcugaacaaccugcuggagggcaacgacagcgacaacgaccugagccuggaggacuucugaggacuagucccuguucccagagcccacuuuuuuuucuuuuuuugaaauaaaauagccugucuuucagaucuaaaaaaaaaaaaaaaaaaaaaaaaaaaaaaaaaaaaaaaaaaaaaaaaaaaaaaaaaaaaaaaaugcaucccccccccccccccccccccccccccccccaaaggcucuuuucagagccaccagaauu

SEQ ID NO: 20716 - RNA, 1024 nt, Artificial Sequence
  mRNA product Design d-1 comprising derived and/or modified sequence from HRSV(Memphis-37)__AIY60637.1__P (opt5)
gggagacccgugacccggaaguuguacggcuacgcgacuuucccucccacaaacccucgcgcccuuccuuuccuacuugggcccggcagaaagcuuaccauggagaaguucgcccccgaauuucacggcgaggacgcuaacaauagagccaccaaauuccuggaaagcaucaaggggaaauuuacauccccuaaggauccgaaaaagaaggacucuauuaucagcgugaacuccauugauaucgaggucacgaaagaaucucccauuaccagcaauuccacaaucaucaacccuaccaaugagacagacgauaccgcgggaaacaagcccaauuaccagcggaaaccucucguuucuuucaaggaggaccccacaccuagcgauaacccguuuuccaaacuguauaaggaaaccauugagacguucgacaauaacgaagaggagagcucuuacuccuaugaagagaucaaugaucaaaccaacgacaauauuacagcucgccuugauagaaucgacgaaaagcugagcgagauucucggcaugcugcauacccuugugguggccucugccgggcccacauccgcucgggauggaauccgcgacgccauggucggccugagagaagagaugauugagaaaauccggaccgaagcucucaugacgaacgaccgccuggaggccauggcgagacugcggaaugaagagagcgaaaagauggccaaagauacaucugacgaggugucccucaacccuaccagcgagaagcugaacaaucuucuggaagggaacgauuccgacaaugaucucucucuggaggacuuuugaggacuagucccuguucccagagcccacuuuuuuuucuuuuuuugaaauaaaauagccugucuuucagaucuaaaaaaaaaaaaaaaaaaaaaaaaaaaaaaaaaaaaaaaaaaaaaaaaaaaaaaaaaaaaaaaaugcaucccccccccccccccccccccccccccccccaaaggcucuuuucagagccaccagaauu

SEQ ID NO: 20717 - RNA, 1024 nt, Artificial Sequence
  mRNA product Design d-1 comprising derived and/or modified sequence from HRSV(Memphis-37)__AIY60637.1__P (opt6)
gggagacccgugacccggaaguuguacggcuacgcgacuuucccucccacaaacccucgcgcccuuccuuuccuacuugggcccggcagaaagcuuaccauggaaaaauucgcaccagaauuccacggagaagacgcaaacaacagagcaacaaaauuccuagaaucaauaaaaggaaaauucacaagcccaaaagaucccaaaaaaaaagacucaaucauaagcguaaacucaauagauauagaaguaacaaaagaaaguccaauaacaagcaacaguacaauaauaaacccaacaaaugaaacagacgauacagcaggcaacaaaccaaacuaccaaagaaaaccgcuaguaaguuucaaagaagacccaacaccaagcgauaacccauuuucaaaauuauacaaagaaacaauagaaacauucgacaacaacgaagaagaaagcucauacucauacgaagaaauaaacgaccaaacaaacgacaacauaacagcgagauuagacagaauagacgaaaaacuaucagaaauacuaggcauguuacacacauuaguaguagcaagcgcaggaccaacaucagcaagagacggaauccgagacgcaaugguaggacuaagagaagaaaugauagaaaaaauaagaacagaagcacuaaugacaaacgacagacuagaagccauggcaagacuaagaaacgaagaaucagaaaaaauggcaaaagacacaucagacgaaguaucacuaaacccaacaagcgaaaaacuaaacaaccuauuagaaggaaacgacagcgacaacgaccuaucacucgaagacuucuaaggacuagucccuguucccagagcccacuuuuuuuucuuuuuuugaaauaaaauagccugucuuucagaucuaaaaaaaaaaaaaaaaaaaaaaaaaaaaaaaaaaaaaaaaaaaaaaaaaaaaaaaaaaaaaaaaugcaucccccccccccccccccccccccccccccccaaaggcucuuuucagagccaccagaauu

SEQ ID NO: 20718 - RNA, 1024 nt, Artificial Sequence
  mRNA product Design d-1 comprising derived and/or modified sequence from HRSV(Memphis-37)__AIY60637.1__P (opt11)
gggagacccgugacccggaaguuguacggcuacgcgacuuucccucccacaaacccucgcgcccuuccuuuccuacuugggcccggcagaaagcuuaccauggaaaaauucgccccagaauuucacggcgaagacgccaacaaccgagccaccaaauuccucgaaucaauaaaaggcaaauucacaucccccaaagaccccaaaaaaaaagacucgaucaucuccgugaacucaaucgacauagaagucaccaaagaaagccccaucaccuccaacagcaccaucaucaaccccacaaacgaaacagacgacaccgccggcaacaaaccaaacuaccaacgaaaaccccucgucagcuucaaagaagaccccacaccaagcgacaaccccuucuccaaacucuacaaagaaacaauagaaaccuucgacaacaacgaagaagaaagcucguacucauacgaagaaaucaacgaccaaaccaacgacaacaucaccgcccgccucgaccgcaucgacgaaaaacucuccgaaauccucggaaugcuccacacacucgucgucgccagcgccggccccaccucagcccgggacggcauccgcgacgccauggugggccuccgcgaggaaaugaucgaaaaaauccgcacagaagcccucaugaccaacgaccgccucgaagccauggcccgccuccgcaacgaagaauccgaaaaaauggccaaagacaccuccgacgaagucucacuaaaccccaccuccgaaaaacuaaacaaccuccuagaaggcaacgacagcgacaacgaccucucccuagaagacuucuaaggacuagucccuguucccagagcccacuuuuuuuucuuuuuuugaaauaaaauagccugucuuucagaucuaaaaaaaaaaaaaaaaaaaaaaaaaaaaaaaaaaaaaaaaaaaaaaaaaaaaaaaaaaaaaaaaugcaucccccccccccccccccccccccccccccccaaaggcucuuuucagagccaccagaauu

SEQ ID NO: 20719 - RNA, 1079 nt, Artificial Sequence
  mRNA product Design d-2 comprising derived and/or modified sequence from HRSV(Memphis-37)__AIY60637.1__P (wt)
gggagagcggcucggccauuuugucccagucaguccggaggcugcggcugcagaaguaccgccugcggaguaacugcaaagaagcuuaccauggaaaaguuugcuccugaauuccauggagaagacgcaaacaacagagccacuaaauuccuagaaucaauaaagggcaaauucacaucaccuaaagaucccaagaaaaaagauaguaucauaucugucaacucaauagauauagaaguaaccaaagaaagcccuauaacuucaaauucaaccauuauaaacccuacaaaugagacagaugauacugcagggaacaagcccaauuaucaaagaaaaccacuagugaguuucaaagaagacccuacgccaagugauaaucccuuuucaaaacuauacaaagaaaccauagaaacauuugauaacaaugaagaagaaucuagcuauucauaugaagaaauaaaugaucagacaaacgauaauauaacagcaagauuagauaggauugaugaaaaauuaagugaaauacuaggaaugcuucacacacuaguaguagcaagugcaggaccuacaucugcucgggaugguauaagagaugccaugguugguuuaagagaagaaaugauagaaaaaaucagaacugaagcauugaugaccaaugauagauuagaagcuauggcaagacucaggaaugaggaaagugaaaagauggcaaaagacacaucagaugaagugucucucaauccaacaucagagaaauugaacaaccuguuggaaggaaaugauagugauaaugaucuaucacuugaagauuucugaggacuaguaauaaggaaacuguaugaaugucugugggcaggaagugaagagauccuucuguaaagguuuuuggaauuaugucugcugaauaauaaacuuuuuugaaauaauaaaucugguagaaaaaugagaucuaaaaaaaaaaaaaaaaaaaaaaaaaaaaaaaaaaaaaaaaaaaaaaaaaaaaaaaaaaaaaaaaugcaucccccccccccccccccccccccccccccccaaaggcucuuuucagagccaccagaauu

SEQ ID NO: 20720 - RNA, 1079 nt, Artificial Sequence
  mRNA product Design d-2 comprising derived and/or modified sequence from HRSV(Memphis-37)__AIY60637.1__P (opt1)
gggagagcggcucggccauuuugucccagucaguccggaggcugcggcugcagaaguaccgccugcggaguaacugcaaagaagcuuaccauggagaaguucgcccccgaguuccacggcgaggacgccaacaaccgcgcgaccaaguuccuggagagcaucaaggggaaguucaccuccccgaaggaccccaagaagaaggacagcaucaucuccgugaacagcaucgacaucgaggucacgaaggagucccccaucaccagcaacuccaccaucaucaaccccaccaacgagacggacgacaccgccggcaacaagccgaacuaccagcggaagccccucgugagcuucaaggaggaccccacccccuccgacaacccguucagcaagcuguacaaggagaccaucgagacguucgacaacaacgaggaggaguccagcuacuccuacgaggagaucaacgaccagaccaacgacaacaucaccgcccgccuggaccggaucgacgagaagcucagcgagauccuggggaugcugcacacccucguggucgccuccgccggccccacgagcgcgcgcgacgggauccgggacgccauggugggccugcgcgaggagaugaucgagaagauccggaccgaggcccugaugaccaacgaccgccucgaggccauggcgcggcugcgcaacgaggaguccgagaagauggccaaggacaccagcgacgaggugucccugaaccccacgagcgagaagcucaacaaccugcuggagggcaacgacagcgacaacgaccucucccuggaggacuucugaggacuaguaauaaggaaacuguaugaaugucugugggcaggaagugaagagauccuucuguaaagguuuuuggaauuaugucugcugaauaauaaacuuuuuugaaauaauaaaucugguagaaaaaugagaucuaaaaaaaaaaaaaaaaaaaaaaaaaaaaaaaaaaaaaaaaaaaaaaaaaaaaaaaaaaaaaaaaugcaucccccccccccccccccccccccccccccccaaaggcucuuuucagagccaccagaauu

SEQ ID NO: 20721 - RNA, 1079 nt, Artificial Sequence
  mRNA product Design d-2 comprising derived and/or modified sequence from HRSV(Memphis-37)__AIY60637.1__P (opt2)
gggagagcggcucggccauuuugucccagucaguccggaggcugcggcugcagaaguaccgccugcggaguaacugcaaagaagcuuaccauggagaaguucgcccccgaguuccacggcgaggacgccaacaaccgcgccaccaaguuccucgaguccaucaagggcaaguucaccucccccaaggaccccaagaagaaggacuccaucaucuccgucaacuccaucgacaucgaggucaccaaggagucccccaucaccuccaacuccaccaucaucaaccccaccaacgagaccgacgacaccgccggcaacaagcccaacuaccagcgcaagccccucgucuccuucaaggaggaccccacccccuccgacaaccccuucuccaagcucuacaaggagaccaucgagaccuucgacaacaacgaggaggaguccuccuacuccuacgaggagaucaacgaccagaccaacgacaacaucaccgcccgccucgaccgcaucgacgagaagcucuccgagauccucggcaugcuccacacccucgucgucgccuccgccggccccaccuccgcccgcgacggcauccgcgacgccauggucggccuccgcgaggagaugaucgagaagauccgcaccgaggcccucaugaccaacgaccgccucgaggccauggcccgccuccgcaacgaggaguccgagaagauggccaaggacaccuccgacgaggucucccucaaccccaccuccgagaagcucaacaaccuccucgagggcaacgacuccgacaacgaccucucccucgaggacuucugaggacuaguaauaaggaaacuguaugaaugucugugggcaggaagugaagagauccuucuguaaagguuuuuggaauuaugucugcugaauaauaaacuuuuuugaaauaauaaaucugguagaaaaaugagaucuaaaaaaaaaaaaaaaaaaaaaaaaaaaaaaaaaaaaaaaaaaaaaaaaaaaaaaaaaaaaaaaaugcaucccccccccccccccccccccccccccccccaaaggcucuuuucagagccaccagaauu

SEQ ID NO: 20722 - RNA, 1079 nt, Artificial Sequence
  mRNA product Design d-2 comprising derived and/or modified sequence from HRSV(Memphis-37)__AIY60637.1__P (opt3)
gggagagcggcucggccauuuugucccagucaguccggaggcugcggcugcagaaguaccgccugcggaguaacugcaaagaagcuuaccauggagaaguucgcccccgaauuucacggcgaggacgcuaacaauagagcaaccaaauuccuggaaagcaucaaggggaaauuuacauccccuaaggauccgaaaaagaaggacucuauuauaucagugaacaguaucgauauugaggucacuaaagaaagcccaaucacguccaauucuaccauuaucaaccccacaaaugagacugacgauaccgccggaaacaagccuaauuaccagaggaaaccacucguuucguucaaggaggaccccacaccuucagauaacccauuuagcaaacuuuauaaggaaaccauagagacuuucgacaauaacgaagaggagaguuccuacucuuaugaagagaucaaugaucaaacaaacgacaauauuaccgcgcggcuggaucgcaucgacgaaaaguugagcgagauuuuagguaugcugcauacgcuagugguagcuuccgccggccccacuucagcacgagaugggauccgugacgccauggugggacucagagaagagaugauagagaaaauuaggaccgaagcucugaugacaaacgaccggcuugaggcaauggcccgccugagaaaugaagagagugaaaagauggcuaaagauacuagcgacgaggucucuuugaacccuaccuccgagaagcucaacaaucugcuggaaggcaacgauucagacaaugaucucagcuuagaggacuuuugaggacuaguaauaaggaaacuguaugaaugucugugggcaggaagugaagagauccuucuguaaagguuuuuggaauuaugucugcugaauaauaaacuuuuuugaaauaauaaaucugguagaaaaaugagaucuaaaaaaaaaaaaaaaaaaaaaaaaaaaaaaaaaaaaaaaaaaaaaaaaaaaaaaaaaaaaaaaaugcaucccccccccccccccccccccccccccccccaaaggcucuuuucagagccaccagaauu

SEQ ID NO: 20723 - RNA, 1079 nt, Artificial Sequence
  mRNA product Design d-2 comprising derived and/or modified sequence from HRSV(Memphis-37)__AIY60637.1__P (opt4)
gggagagcggcucggccauuuugucccagucaguccggaggcugcggcugcagaaguaccgccugcggaguaacugcaaagaagcuuaccauggagaaguucgcccccgaguuccacggcgaggacgccaacaacagagccaccaaguuccuggagagcaucaagggcaaguucaccagccccaaggaccccaagaagaaggacagcaucaucagcgugaacagcaucgacaucgaggugaccaaggagagccccaucaccagcaacagcaccaucaucaaccccaccaacgagaccgacgacaccgccggcaacaagcccaacuaccagagaaagccccuggugagcuucaaggaggaccccacccccagcgacaaccccuucagcaagcuguacaaggagaccaucgagaccuucgacaacaacgaggaggagagcagcuacagcuacgaggagaucaacgaccagaccaacgacaacaucaccgccagacuggacagaaucgacgagaagcugagcgagauccugggcaugcugcacacccuggugguggccagcgccggccccaccagcgccagagacggcaucagagacgccauggugggccugagagaggagaugaucgagaagaucagaaccgaggcccugaugaccaacgacagacuggaggccauggccagacugagaaacgaggagagcgagaagauggccaaggacaccagcgacgaggugagccugaaccccaccagcgagaagcugaacaaccugcuggagggcaacgacagcgacaacgaccugagccuggaggacuucugaggacuaguaauaaggaaacuguaugaaugucugugggcaggaagugaagagauccuucuguaaagguuuuuggaauuaugucugcugaauaauaaacuuuuuugaaauaauaaaucugguagaaaaaugagaucuaaaaaaaaaaaaaaaaaaaaaaaaaaaaaaaaaaaaaaaaaaaaaaaaaaaaaaaaaaaaaaaaugcaucccccccccccccccccccccccccccccccaaaggcucuuuucagagccaccagaauu

SEQ ID NO: 20724 - RNA, 1079 nt, Artificial Sequence
  mRNA product Design d-2 comprising derived and/or modified sequence from HRSV(Memphis-37)__AIY60637.1__P (opt5)
gggagagcggcucggccauuuugucccagucaguccggaggcugcggcugcagaaguaccgccugcggaguaacugcaaagaagcuuaccauggagaaguucgcccccgaauuucacggcgaggacgcuaacaauagagccaccaaauuccuggaaagcaucaaggggaaauuuacauccccuaaggauccgaaaaagaaggacucuauuaucagcgugaacuccauugauaucgaggucacgaaagaaucucccauuaccagcaauuccacaaucaucaacccuaccaaugagacagacgauaccgcgggaaacaagcccaauuaccagcggaaaccucucguuucuuucaaggaggaccccacaccuagcgauaacccguuuuccaaacuguauaaggaaaccauugagacguucgacaauaacgaagaggagagcucuuacuccuaugaagagaucaaugaucaaaccaacgacaauauuacagcucgccuugauagaaucgacgaaaagcugagcgagauucucggcaugcugcauacccuugugguggccucugccgggcccacauccgcucgggauggaauccgcgacgccauggucggccugagagaagagaugauugagaaaauccggaccgaagcucucaugacgaacgaccgccuggaggccauggcgagacugcggaaugaagagagcgaaaagauggccaaagauacaucugacgaggugucccucaacccuaccagcgagaagcugaacaaucuucuggaagggaacgauuccgacaaugaucucucucuggaggacuuuugaggacuaguaauaaggaaacuguaugaaugucugugggcaggaagugaagagauccuucuguaaagguuuuuggaauuaugucugcugaauaauaaacuuuuuugaaauaauaaaucugguagaaaaaugagaucuaaaaaaaaaaaaaaaaaaaaaaaaaaaaaaaaaaaaaaaaaaaaaaaaaaaaaaaaaaaaaaaaugcaucccccccccccccccccccccccccccccccaaaggcucuuuucagagccaccagaauu

SEQ ID NO: 20725 - RNA, 1079 nt, Artificial Sequence
  mRNA product Design d-2 comprising derived and/or modified sequence from HRSV(Memphis-37)__AIY60637.1__P (opt6)
gggagagcggcucggccauuuugucccagucaguccggaggcugcggcugcagaaguaccgccugcggaguaacugcaaagaagcuuaccauggaaaaauucgcaccagaauuccacggagaagacgcaaacaacagagcaacaaaauuccuagaaucaauaaaaggaaaauucacaagcccaaaagaucccaaaaaaaaagacucaaucauaagcguaaacucaauagauauagaaguaacaaaagaaaguccaauaacaagcaacaguacaauaauaaacccaacaaaugaaacagacgauacagcaggcaacaaaccaaacuaccaaagaaaaccgcuaguaaguuucaaagaagacccaacaccaagcgauaacccauuuucaaaauuauacaaagaaacaauagaaacauucgacaacaacgaagaagaaagcucauacucauacgaagaaauaaacgaccaaacaaacgacaacauaacagcgagauuagacagaauagacgaaaaacuaucagaaauacuaggcauguuacacacauuaguaguagcaagcgcaggaccaacaucagcaagagacggaauccgagacgcaaugguaggacuaagagaagaaaugauagaaaaaauaagaacagaagcacuaaugacaaacgacagacuagaagccauggcaagacuaagaaacgaagaaucagaaaaaauggcaaaagacacaucagacgaaguaucacuaaacccaacaagcgaaaaacuaaacaaccuauuagaaggaaacgacagcgacaacgaccuaucacucgaagacuucuaaggacuaguaauaaggaaacuguaugaaugucugugggcaggaagugaagagauccuucuguaaagguuuuuggaauuaugucugcugaauaauaaacuuuuuugaaauaauaaaucugguagaaaaaugagaucuaaaaaaaaaaaaaaaaaaaaaaaaaaaaaaaaaaaaaaaaaaaaaaaaaaaaaaaaaaaaaaaaugcaucccccccccccccccccccccccccccccccaaaggcucuuuucagagccaccagaauu

SEQ ID NO: 20726 - RNA, 1079 nt, Artificial Sequence
  mRNA product Design d-2 comprising derived and/or modified sequence from HRSV(Memphis-37)__AIY60637.1__P (opt11)
gggagagcggcucggccauuuugucccagucaguccggaggcugcggcugcagaaguaccgccugcggaguaacugcaaagaagcuuaccauggaaaaauucgccccagaauuucacggcgaagacgccaacaaccgagccaccaaauuccucgaaucaauaaaaggcaaauucacaucccccaaagaccccaaaaaaaaagacucgaucaucuccgugaacucaaucgacauagaagucaccaaagaaagccccaucaccuccaacagcaccaucaucaaccccacaaacgaaacagacgacaccgccggcaacaaaccaaacuaccaacgaaaaccccucgucagcuucaaagaagaccccacaccaagcgacaaccccuucuccaaacucuacaaagaaacaauagaaaccuucgacaacaacgaagaagaaagcucguacucauacgaagaaaucaacgaccaaaccaacgacaacaucaccgcccgccucgaccgcaucgacgaaaaacucuccgaaauccucggaaugcuccacacacucgucgucgccagcgccggccccaccucagcccgggacggcauccgcgacgccauggugggccuccgcgaggaaaugaucgaaaaaauccgcacagaagcccucaugaccaacgaccgccucgaagccauggcccgccuccgcaacgaagaauccgaaaaaauggccaaagacaccuccgacgaagucucacuaaaccccaccuccgaaaaacuaaacaaccuccuagaaggcaacgacagcgacaacgaccucucccuagaagacuucuaaggacuaguaauaaggaaacuguaugaaugucugugggcaggaagugaagagauccuucuguaaagguuuuuggaauuaugucugcugaauaauaaacuuuuuugaaauaauaaaucugguagaaaaaugagaucuaaaaaaaaaaaaaaaaaaaaaaaaaaaaaaaaaaaaaaaaaaaaaaaaaaaaaaaaaaaaaaaaugcaucccccccccccccccccccccccccccccccaaaggcucuuuucagagccaccagaauu

SEQ ID NO: 20727 - RNA, 1395 nt, Artificial Sequence
  mRNA product Design d-3 comprising derived and/or modified sequence from HRSV(Memphis-37)__AIY60637.1__P (wt)
gggagagggcgcuuggcuugcaaggacccugagcugcggcauugaagcacacccaacccaacucgacugaagucagccucacugaaccggaucugagaaucuucucucucugggcuugccagggcucuccgaaccuagcuagcauccucuucaauuccaacuagaaagcuuaccauggaaaaguuugcuccugaauuccauggagaagacgcaaacaacagagccacuaaauuccuagaaucaauaaagggcaaauucacaucaccuaaagaucccaagaaaaaagauaguaucauaucugucaacucaauagauauagaaguaaccaaagaaagcccuauaacuucaaauucaaccauuauaaacccuacaaaugagacagaugauacugcagggaacaagcccaauuaucaaagaaaaccacuagugaguuucaaagaagacccuacgccaagugauaaucccuuuucaaaacuauacaaagaaaccauagaaacauuugauaacaaugaagaagaaucuagcuauucauaugaagaaauaaaugaucagacaaacgauaauauaacagcaagauuagauaggauugaugaaaaauuaagugaaauacuaggaaugcuucacacacuaguaguagcaagugcaggaccuacaucugcucgggaugguauaagagaugccaugguugguuuaagagaagaaaugauagaaaaaaucagaacugaagcauugaugaccaaugauagauuagaagcuauggcaagacucaggaaugaggaaagugaaaagauggcaaaagacacaucagaugaagugucucucaauccaacaucagagaaauugaacaaccuguuggaaggaaaugauagugauaaugaucuaucacuugaagauuucugaggacuagugaagggaacacccaaauuuaauucagccuuaagcacaauuaauuaagagugaaacguaauuguacaagcaguuggucacccaccauagggcaugaucaacaccgcaaccuuuccuuuuucccccagugauucugaaaaaccccucuucccuucagcuugcuuagauguuccaaauuuaguaagcuuaaggcggccuacagaagaaaaagaaaaaaaaggccacaaaaguucccucucacuuucaguaaauaaaauaaaagcagcaacagaaauaaagaaauaaaugaaauucaaaaugaaauaaauauuguguugugcagcauuaaaaaaucaauaaaaauuaaaaaugagcaagaucuaaaaaaaaaaaaaaaaaaaaaaaaaaaaaaaaaaaaaaaaaaaaaaaaaaaaaaaaaaaaaaaaugcaucccccccccccccccccccccccccccccccaaaggcucuuuucagagccaccagaauu

SEQ ID NO: 20728 - RNA, 1395 nt, Artificial Sequence
  mRNA product Design d-3 comprising derived and/or modified sequence from HRSV(Memphis-37)__AIY60637.1__P (opt1)
gggagagggcgcuuggcuugcaaggacccugagcugcggcauugaagcacacccaacccaacucgacugaagucagccucacugaaccggaucugagaaucuucucucucugggcuugccagggcucuccgaaccuagcuagcauccucuucaauuccaacuagaaagcuuaccauggagaaguucgcccccgaguuccacggcgaggacgccaacaaccgcgcgaccaaguuccuggagagcaucaaggggaaguucaccuccccgaaggaccccaagaagaaggacagcaucaucuccgugaacagcaucgacaucgaggucacgaaggagucccccaucaccagcaacuccaccaucaucaaccccaccaacgagacggacgacaccgccggcaacaagccgaacuaccagcggaagccccucgugagcuucaaggaggaccccacccccuccgacaacccguucagcaagcuguacaaggagaccaucgagacguucgacaacaacgaggaggaguccagcuacuccuacgaggagaucaacgaccagaccaacgacaacaucaccgcccgccuggaccggaucgacgagaagcucagcgagauccuggggaugcugcacacccucguggucgccuccgccggccccacgagcgcgcgcgacgggauccgggacgccauggugggccugcgcgaggagaugaucgagaagauccggaccgaggcccugaugaccaacgaccgccucgaggccauggcgcggcugcgcaacgaggaguccgagaagauggccaaggacaccagcgacgaggugucccugaaccccacgagcgagaagcucaacaaccugcuggagggcaacgacagcgacaacgaccucucccuggaggacuucugaggacuagugaagggaacacccaaauuuaauucagccuuaagcacaauuaauuaagagugaaacguaauuguacaagcaguuggucacccaccauagggcaugaucaacaccgcaaccuuuccuuuuucccccagugauucugaaaaaccccucuucccuucagcuugcuuagauguuccaaauuuaguaagcuuaaggcggccuacagaagaaaaagaaaaaaaaggccacaaaaguucccucucacuuucaguaaauaaaauaaaagcagcaacagaaauaaagaaauaaaugaaauucaaaaugaaauaaauauuguguugugcagcauuaaaaaaucaauaaaaauuaaaaaugagcaagaucuaaaaaaaaaaaaaaaaaaaaaaaaaaaaaaaaaaaaaaaaaaaaaaaaaaaaaaaaaaaaaaaaugcaucccccccccccccccccccccccccccccccaaaggcucuuuucagagccaccagaauu

SEQ ID NO: 20729 - RNA, 1395 nt, Artificial Sequence
  mRNA product Design d-3 comprising derived and/or modified sequence from HRSV(Memphis-37)__AIY60637.1__P (opt2)
gggagagggcgcuuggcuugcaaggacccugagcugcggcauugaagcacacccaacccaacucgacugaagucagccucacugaaccggaucugagaaucuucucucucugggcuugccagggcucuccgaaccuagcuagcauccucuucaauuccaacuagaaagcuuaccauggagaaguucgcccccgaguuccacggcgaggacgccaacaaccgcgccaccaaguuccucgaguccaucaagggcaaguucaccucccccaaggaccccaagaagaaggacuccaucaucuccgucaacuccaucgacaucgaggucaccaaggagucccccaucaccuccaacuccaccaucaucaaccccaccaacgagaccgacgacaccgccggcaacaagcccaacuaccagcgcaagccccucgucuccuucaaggaggaccccacccccuccgacaaccccuucuccaagcucuacaaggagaccaucgagaccuucgacaacaacgaggaggaguccuccuacuccuacgaggagaucaacgaccagaccaacgacaacaucaccgcccgccucgaccgcaucgacgagaagcucuccgagauccucggcaugcuccacacccucgucgucgccuccgccggccccaccuccgcccgcgacggcauccgcgacgccauggucggccuccgcgaggagaugaucgagaagauccgcaccgaggcccucaugaccaacgaccgccucgaggccauggcccgccuccgcaacgaggaguccgagaagauggccaaggacaccuccgacgaggucucccucaaccccaccuccgagaagcucaacaaccuccucgagggcaacgacuccgacaacgaccucucccucgaggacuucugaggacuagugaagggaacacccaaauuuaauucagccuuaagcacaauuaauuaagagugaaacguaauuguacaagcaguuggucacccaccauagggcaugaucaacaccgcaaccuuuccuuuuucccccagugauucugaaaaaccccucuucccuucagcuugcuuagauguuccaaauuuaguaagcuuaaggcggccuacagaagaaaaagaaaaaaaaggccacaaaaguucccucucacuuucaguaaauaaaauaaaagcagcaacagaaauaaagaaauaaaugaaauucaaaaugaaauaaauauuguguugugcagcauuaaaaaaucaauaaaaauuaaaaaugagcaagaucuaaaaaaaaaaaaaaaaaaaaaaaaaaaaaaaaaaaaaaaaaaaaaaaaaaaaaaaaaaaaaaaaugcaucccccccccccccccccccccccccccccccaaaggcucuuuucagagccaccagaauu

SEQ ID NO: 20730 - RNA, 1395 nt, Artificial Sequence
  mRNA product Design d-3 comprising derived and/or modified sequence from HRSV(Memphis-37)__AIY60637.1__P (opt3)
gggagagggcgcuuggcuugcaaggacccugagcugcggcauugaagcacacccaacccaacucgacugaagucagccucacugaaccggaucugagaaucuucucucucugggcuugccagggcucuccgaaccuagcuagcauccucuucaauuccaacuagaaagcuuaccauggagaaguucgcccccgaauuucacggcgaggacgcuaacaauagagcaaccaaauuccuggaaagcaucaaggggaaauuuacauccccuaaggauccgaaaaagaaggacucuauuauaucagugaacaguaucgauauugaggucacuaaagaaagcccaaucacguccaauucuaccauuaucaaccccacaaaugagacugacgauaccgccggaaacaagccuaauuaccagaggaaaccacucguuucguucaaggaggaccccacaccuucagauaacccauuuagcaaacuuuauaaggaaaccauagagacuuucgacaauaacgaagaggagaguuccuacucuuaugaagagaucaaugaucaaacaaacgacaauauuaccgcgcggcuggaucgcaucgacgaaaaguugagcgagauuuuagguaugcugcauacgcuagugguagcuuccgccggccccacuucagcacgagaugggauccgugacgccauggugggacucagagaagagaugauagagaaaauuaggaccgaagcucugaugacaaacgaccggcuugaggcaauggcccgccugagaaaugaagagagugaaaagauggcuaaagauacuagcgacgaggucucuuugaacccuaccuccgagaagcucaacaaucugcuggaaggcaacgauucagacaaugaucucagcuuagaggacuuuugaggacuagugaagggaacacccaaauuuaauucagccuuaagcacaauuaauuaagagugaaacguaauuguacaagcaguuggucacccaccauagggcaugaucaacaccgcaaccuuuccuuuuucccccagugauucugaaaaaccccucuucccuucagcuugcuuagauguuccaaauuuaguaagcuuaaggcggccuacagaagaaaaagaaaaaaaaggccacaaaaguucccucucacuuucaguaaauaaaauaaaagcagcaacagaaauaaagaaauaaaugaaauucaaaaugaaauaaauauuguguugugcagcauuaaaaaaucaauaaaaauuaaaaaugagcaagaucuaaaaaaaaaaaaaaaaaaaaaaaaaaaaaaaaaaaaaaaaaaaaaaaaaaaaaaaaaaaaaaaaugcaucccccccccccccccccccccccccccccccaaaggcucuuuucagagccaccagaauu

SEQ ID NO: 20731 - RNA, 1395 nt, Artificial Sequence
  mRNA product Design d-3 comprising derived and/or modified sequence from HRSV(Memphis-37)__AIY60637.1__P (opt4)
gggagagggcgcuuggcuugcaaggacccugagcugcggcauugaagcacacccaacccaacucgacugaagucagccucacugaaccggaucugagaaucuucucucucugggcuugccagggcucuccgaaccuagcuagcauccucuucaauuccaacuagaaagcuuaccauggagaaguucgcccccgaguuccacggcgaggacgccaacaacagagccaccaaguuccuggagagcaucaagggcaaguucaccagccccaaggaccccaagaagaaggacagcaucaucagcgugaacagcaucgacaucgaggugaccaaggagagccccaucaccagcaacagcaccaucaucaaccccaccaacgagaccgacgacaccgccggcaacaagcccaacuaccagagaaagccccuggugagcuucaaggaggaccccacccccagcgacaaccccuucagcaagcuguacaaggagaccaucgagaccuucgacaacaacgaggaggagagcagcuacagcuacgaggagaucaacgaccagaccaacgacaacaucaccgccagacuggacagaaucgacgagaagcugagcgagauccugggcaugcugcacacccuggugguggccagcgccggccccaccagcgccagagacggcaucagagacgccauggugggccugagagaggagaugaucgagaagaucagaaccgaggcccugaugaccaacgacagacuggaggccauggccagacugagaaacgaggagagcgagaagauggccaaggacaccagcgacgaggugagccugaaccccaccagcgagaagcugaacaaccugcuggagggcaacgacagcgacaacgaccugagccuggaggacuucugaggacuagugaagggaacacccaaauuuaauucagccuuaagcacaauuaauuaagagugaaacguaauuguacaagcaguuggucacccaccauagggcaugaucaacaccgcaaccuuuccuuuuucccccagugauucugaaaaaccccucuucccuucagcuugcuuagauguuccaaauuuaguaagcuuaaggcggccuacagaagaaaaagaaaaaaaaggccacaaaaguucccucucacuuucaguaaauaaaauaaaagcagcaacagaaauaaagaaauaaaugaaauucaaaaugaaauaaauauuguguugugcagcauuaaaaaaucaauaaaaauuaaaaaugagcaagaucuaaaaaaaaaaaaaaaaaaaaaaaaaaaaaaaaaaaaaaaaaaaaaaaaaaaaaaaaaaaaaaaaugcaucccccccccccccccccccccccccccccccaaaggcucuuuucagagccaccagaauu

SEQ ID NO: 20732 - RNA, 1395 nt, Artificial Sequence
  mRNA product Design d-3 comprising derived and/or modified sequence from HRSV(Memphis-37)__AIY60637.1__P (opt5)
gggagagggcgcuuggcuugcaaggacccugagcugcggcauugaagcacacccaacccaacucgacugaagucagccucacugaaccggaucugagaaucuucucucucugggcuugccagggcucuccgaaccuagcuagcauccucuucaauuccaacuagaaagcuuaccauggagaaguucgcccccgaauuucacggcgaggacgcuaacaauagagccaccaaauuccuggaaagcaucaaggggaaauuuacauccccuaaggauccgaaaaagaaggacucuauuaucagcgugaacuccauugauaucgaggucacgaaagaaucucccauuaccagcaauuccacaaucaucaacccuaccaaugagacagacgauaccgcgggaaacaagcccaauuaccagcggaaaccucucguuucuuucaaggaggaccccacaccuagcgauaacccguuuuccaaacuguauaaggaaaccauugagacguucgacaauaacgaagaggagagcucuuacuccuaugaagagaucaaugaucaaaccaacgacaauauuacagcucgccuugauagaaucgacgaaaagcugagcgagauucucggcaugcugcauacccuugugguggccucugccgggcccacauccgcucgggauggaauccgcgacgccauggucggccugagagaagagaugauugagaaaauccggaccgaagcucucaugacgaacgaccgccuggaggccauggcgagacugcggaaugaagagagcgaaaagauggccaaagauacaucugacgaggugucccucaacccuaccagcgagaagcugaacaaucuucuggaagggaacgauuccgacaaugaucucucucuggaggacuuuugaggacuagugaagggaacacccaaauuuaauucagccuuaagcacaauuaauuaagagugaaacguaauuguacaagcaguuggucacccaccauagggcaugaucaacaccgcaaccuuuccuuuuucccccagugauucugaaaaaccccucuucccuucagcuugcuuagauguuccaaauuuaguaagcuuaaggcggccuacagaagaaaaagaaaaaaaaggccacaaaaguucccucucacuuucaguaaauaaaauaaaagcagcaacagaaauaaagaaauaaaugaaauucaaaaugaaauaaauauuguguugugcagcauuaaaaaaucaauaaaaauuaaaaaugagcaagaucuaaaaaaaaaaaaaaaaaaaaaaaaaaaaaaaaaaaaaaaaaaaaaaaaaaaaaaaaaaaaaaaaugcaucccccccccccccccccccccccccccccccaaaggcucuuuucagagccaccagaauu

SEQ ID NO: 20733 - RNA, 1395 nt, Artificial Sequence
  mRNA product Design d-3 comprising derived and/or modified sequence from HRSV(Memphis-37)__AIY60637.1__P (opt6)
gggagagggcgcuuggcuugcaaggacccugagcugcggcauugaagcacacccaacccaacucgacugaagucagccucacugaaccggaucugagaaucuucucucucugggcuugccagggcucuccgaaccuagcuagcauccucuucaauuccaacuagaaagcuuaccauggaaaaauucgcaccagaauuccacggagaagacgcaaacaacagagcaacaaaauuccuagaaucaauaaaaggaaaauucacaagcccaaaagaucccaaaaaaaaagacucaaucauaagcguaaacucaauagauauagaaguaacaaaagaaaguccaauaacaagcaacaguacaauaauaaacccaacaaaugaaacagacgauacagcaggcaacaaaccaaacuaccaaagaaaaccgcuaguaaguuucaaagaagacccaacaccaagcgauaacccauuuucaaaauuauacaaagaaacaauagaaacauucgacaacaacgaagaagaaagcucauacucauacgaagaaauaaacgaccaaacaaacgacaacauaacagcgagauuagacagaauagacgaaaaacuaucagaaauacuaggcauguuacacacauuaguaguagcaagcgcaggaccaacaucagcaagagacggaauccgagacgcaaugguaggacuaagagaagaaaugauagaaaaaauaagaacagaagcacuaaugacaaacgacagacuagaagccauggcaagacuaagaaacgaagaaucagaaaaaauggcaaaagacacaucagacgaaguaucacuaaacccaacaagcgaaaaacuaaacaaccuauuagaaggaaacgacagcgacaacgaccuaucacucgaagacuucuaaggacuagugaagggaacacccaaauuuaauucagccuuaagcacaauuaauuaagagugaaacguaauuguacaagcaguuggucacccaccauagggcaugaucaacaccgcaaccuuuccuuuuucccccagugauucugaaaaaccccucuucccuucagcuugcuuagauguuccaaauuuaguaagcuuaaggcggccuacagaagaaaaagaaaaaaaaggccacaaaaguucccucucacuuucaguaaauaaaauaaaagcagcaacagaaauaaagaaauaaaugaaauucaaaaugaaauaaauauuguguugugcagcauuaaaaaaucaauaaaaauuaaaaaugagcaagaucuaaaaaaaaaaaaaaaaaaaaaaaaaaaaaaaaaaaaaaaaaaaaaaaaaaaaaaaaaaaaaaaaugcaucccccccccccccccccccccccccccccccaaaggcucuuuucagagccaccagaauu

SEQ ID NO: 20734 - RNA, 1395 nt, Artificial Sequence
  mRNA product Design d-3 comprising derived and/or modified sequence from HRSV(Memphis-37)__AIY60637.1__P (opt11)
gggagagggcgcuuggcuugcaaggacccugagcugcggcauugaagcacacccaacccaacucgacugaagucagccucacugaaccggaucugagaaucuucucucucugggcuugccagggcucuccgaaccuagcuagcauccucuucaauuccaacuagaaagcuuaccauggaaaaauucgccccagaauuucacggcgaagacgccaacaaccgagccaccaaauuccucgaaucaauaaaaggcaaauucacaucccccaaagaccccaaaaaaaaagacucgaucaucuccgugaacucaaucgacauagaagucaccaaagaaagccccaucaccuccaacagcaccaucaucaaccccacaaacgaaacagacgacaccgccggcaacaaaccaaacuaccaacgaaaaccccucgucagcuucaaagaagaccccacaccaagcgacaaccccuucuccaaacucuacaaagaaacaauagaaaccuucgacaacaacgaagaagaaagcucguacucauacgaagaaaucaacgaccaaaccaacgacaacaucaccgcccgccucgaccgcaucgacgaaaaacucuccgaaauccucggaaugcuccacacacucgucgucgccagcgccggccccaccucagcccgggacggcauccgcgacgccauggugggccuccgcgaggaaaugaucgaaaaaauccgcacagaagcccucaugaccaacgaccgccucgaagccauggcccgccuccgcaacgaagaauccgaaaaaauggccaaagacaccuccgacgaagucucacuaaaccccaccuccgaaaaacuaaacaaccuccuagaaggcaacgacagcgacaacgaccucucccuagaagacuucuaaggacuagugaagggaacacccaaauuuaauucagccuuaagcacaauuaauuaagagugaaacguaauuguacaagcaguuggucacccaccauagggcaugaucaacaccgcaaccuuuccuuuuucccccagugauucugaaaaaccccucuucccuucagcuugcuuagauguuccaaauuuaguaagcuuaaggcggccuacagaagaaaaagaaaaaaaaggccacaaaaguucccucucacuuucaguaaauaaaauaaaagcagcaacagaaauaaagaaauaaaugaaauucaaaaugaaauaaauauuguguugugcagcauuaaaaaaucaauaaaaauuaaaaaugagcaagaucuaaaaaaaaaaaaaaaaaaaaaaaaaaaaaaaaaaaaaaaaaaaaaaaaaaaaaaaaaaaaaaaaugcaucccccccccccccccccccccccccccccccaaaggcucuuuucagagccaccagaauu

SEQ ID NO: 20735 - RNA, 1078 nt, Artificial Sequence
  mRNA product Design d-4 comprising derived and/or modified sequence from HRSV(Memphis-37)__AIY60637.1__P (wt)
gggagagucccgcagucggcguccagcggcucugcuuguucgugugugugucguugcaggccuuauucaagcuuaccauggaaaaguuugcuccugaauuccauggagaagacgcaaacaacagagccacuaaauuccuagaaucaauaaagggcaaauucacaucaccuaaagaucccaagaaaaaagauaguaucauaucugucaacucaauagauauagaaguaaccaaagaaagcccuauaacuucaaauucaaccauuauaaacccuacaaaugagacagaugauacugcagggaacaagcccaauuaucaaagaaaaccacuagugaguuucaaagaagacccuacgccaagugauaaucccuuuucaaaacuauacaaagaaaccauagaaacauuugauaacaaugaagaagaaucuagcuauucauaugaagaaauaaaugaucagacaaacgauaauauaacagcaagauuagauaggauugaugaaaaauuaagugaaauacuaggaaugcuucacacacuaguaguagcaagugcaggaccuacaucugcucgggaugguauaagagaugccaugguugguuuaagagaagaaaugauagaaaaaaucagaacugaagcauugaugaccaaugauagauuagaagcuauggcaagacucaggaaugaggaaagugaaaagauggcaaaagacacaucagaugaagugucucucaauccaacaucagagaaauugaacaaccuguuggaaggaaaugauagugauaaugaucuaucacuugaagauuucugaggacuaguggaagcauuuuccuggcugauuaaaagaaauuacucagcuauggucaucuguuccuguuagaaggcuaugcagcauauuauauacuaugcgcauguuaugaaaugcauaauaaaaaauuuuaaaaaaucuaaaagaucuaaaaaaaaaaaaaaaaaaaaaaaaaaaaaaaaaaaaaaaaaaaaaaaaaaaaaaaaaaaaaaaaugcaucccccccccccccccccccccccccccccccaaaggcucuuuucagagccaccagaauu

SEQ ID NO: 20736 - RNA, 1078 nt, Artificial Sequence
  mRNA product Design d-4 comprising derived and/or modified sequence from HRSV(Memphis-37)__AIY60637.1__P (opt1)
gggagagucccgcagucggcguccagcggcucugcuuguucgugugugugucguugcaggccuuauucaagcuuaccauggagaaguucgcccccgaguuccacggcgaggacgccaacaaccgcgcgaccaaguuccuggagagcaucaaggggaaguucaccuccccgaaggaccccaagaagaaggacagcaucaucuccgugaacagcaucgacaucgaggucacgaaggagucccccaucaccagcaacuccaccaucaucaaccccaccaacgagacggacgacaccgccggcaacaagccgaacuaccagcggaagccccucgugagcuucaaggaggaccccacccccuccgacaacccguucagcaagcuguacaaggagaccaucgagacguucgacaacaacgaggaggaguccagcuacuccuacgaggagaucaacgaccagaccaacgacaacaucaccgcccgccuggaccggaucgacgagaagcucagcgagauccuggggaugcugcacacccucguggucgccuccgccggccccacgagcgcgcgcgacgggauccgggacgccauggugggccugcgcgaggagaugaucgagaagauccggaccgaggcccugaugaccaacgaccgccucgaggccauggcgcggcugcgcaacgaggaguccgagaagauggccaaggacaccagcgacgaggugucccugaaccccacgagcgagaagcucaacaaccugcuggagggcaacgacagcgacaacgaccucucccuggaggacuucugaggacuaguggaagcauuuuccuggcugauuaaaagaaauuacucagcuauggucaucuguuccuguuagaaggcuaugcagcauauuauauacuaugcgcauguuaugaaaugcauaauaaaaaauuuuaaaaaaucuaaaagaucuaaaaaaaaaaaaaaaaaaaaaaaaaaaaaaaaaaaaaaaaaaaaaaaaaaaaaaaaaaaaaaaaugcaucccccccccccccccccccccccccccccccaaaggcucuuuucagagccaccagaauu

SEQ ID NO: 20737 - RNA, 1078 nt, Artificial Sequence
  mRNA product Design d-4 comprising derived and/or modified sequence from HRSV(Memphis-37)__AIY60637.1__P (opt2)
gggagagucccgcagucggcguccagcggcucugcuuguucgugugugugucguugcaggccuuauucaagcuuaccauggagaaguucgcccccgaguuccacggcgaggacgccaacaaccgcgccaccaaguuccucgaguccaucaagggcaaguucaccucccccaaggaccccaagaagaaggacuccaucaucuccgucaacuccaucgacaucgaggucaccaaggagucccccaucaccuccaacuccaccaucaucaaccccaccaacgagaccgacgacaccgccggcaacaagcccaacuaccagcgcaagccccucgucuccuucaaggaggaccccacccccuccgacaaccccuucuccaagcucuacaaggagaccaucgagaccuucgacaacaacgaggaggaguccuccuacuccuacgaggagaucaacgaccagaccaacgacaacaucaccgcccgccucgaccgcaucgacgagaagcucuccgagauccucggcaugcuccacacccucgucgucgccuccgccggccccaccuccgcccgcgacggcauccgcgacgccauggucggccuccgcgaggagaugaucgagaagauccgcaccgaggcccucaugaccaacgaccgccucgaggccauggcccgccuccgcaacgaggaguccgagaagauggccaaggacaccuccgacgaggucucccucaaccccaccuccgagaagcucaacaaccuccucgagggcaacgacuccgacaacgaccucucccucgaggacuucugaggacuaguggaagcauuuuccuggcugauuaaaagaaauuacucagcuauggucaucuguuccuguuagaaggcuaugcagcauauuauauacuaugcgcauguuaugaaaugcauaauaaaaaauuuuaaaaaaucuaaaagaucuaaaaaaaaaaaaaaaaaaaaaaaaaaaaaaaaaaaaaaaaaaaaaaaaaaaaaaaaaaaaaaaaugcaucccccccccccccccccccccccccccccccaaaggcucuuuucagagccaccagaauu

SEQ ID NO: 20738 - RNA, 1078 nt, Artificial Sequence
  mRNA product Design d-4 comprising derived and/or modified sequence from HRSV(Memphis-37)__AIY60637.1__P (opt3)
gggagagucccgcagucggcguccagcggcucugcuuguucgugugugugucguugcaggccuuauucaagcuuaccauggagaaguucgcccccgaauuucacggcgaggacgcuaacaauagagcaaccaaauuccuggaaagcaucaaggggaaauuuacauccccuaaggauccgaaaaagaaggacucuauuauaucagugaacaguaucgauauugaggucacuaaagaaagcccaaucacguccaauucuaccauuaucaaccccacaaaugagacugacgauaccgccggaaacaagccuaauuaccagaggaaaccacucguuucguucaaggaggaccccacaccuucagauaacccauuuagcaaacuuuauaaggaaaccauagagacuuucgacaauaacgaagaggagaguuccuacucuuaugaagagaucaaugaucaaacaaacgacaauauuaccgcgcggcuggaucgcaucgacgaaaaguugagcgagauuuuagguaugcugcauacgcuagugguagcuuccgccggccccacuucagcacgagaugggauccgugacgccauggugggacucagagaagagaugauagagaaaauuaggaccgaagcucugaugacaaacgaccggcuugaggcaauggcccgccugagaaaugaagagagugaaaagauggcuaaagauacuagcgacgaggucucuuugaacccuaccuccgagaagcucaacaaucugcuggaaggcaacgauucagacaaugaucucagcuuagaggacuuuugaggacuaguggaagcauuuuccuggcugauuaaaagaaauuacucagcuauggucaucuguuccuguuagaaggcuaugcagcauauuauauacuaugcgcauguuaugaaaugcauaauaaaaaauuuuaaaaaaucuaaaagaucuaaaaaaaaaaaaaaaaaaaaaaaaaaaaaaaaaaaaaaaaaaaaaaaaaaaaaaaaaaaaaaaaugcaucccccccccccccccccccccccccccccccaaaggcucuuuucagagccaccagaauu

SEQ ID NO: 20739 - RNA, 1078 nt, Artificial Sequence
  mRNA product Design d-4 comprising derived and/or modified sequence from HRSV(Memphis-37)__AIY60637.1__P (opt4)
gggagagucccgcagucggcguccagcggcucugcuuguucgugugugugucguugcaggccuuauucaagcuuaccauggagaaguucgcccccgaguuccacggcgaggacgccaacaacagagccaccaaguuccuggagagcaucaagggcaaguucaccagccccaaggaccccaagaagaaggacagcaucaucagcgugaacagcaucgacaucgaggugaccaaggagagccccaucaccagcaacagcaccaucaucaaccccaccaacgagaccgacgacaccgccggcaacaagcccaacuaccagagaaagccccuggugagcuucaaggaggaccccacccccagcgacaaccccuucagcaagcuguacaaggagaccaucgagaccuucgacaacaacgaggaggagagcagcuacagcuacgaggagaucaacgaccagaccaacgacaacaucaccgccagacuggacagaaucgacgagaagcugagcgagauccugggcaugcugcacacccuggugguggccagcgccggccccaccagcgccagagacggcaucagagacgccauggugggccugagagaggagaugaucgagaagaucagaaccgaggcccugaugaccaacgacagacuggaggccauggccagacugagaaacgaggagagcgagaagauggccaaggacaccagcgacgaggugagccugaaccccaccagcgagaagcugaacaaccugcuggagggcaacgacagcgacaacgaccugagccuggaggacuucugaggacuaguggaagcauuuuccuggcugauuaaaagaaauuacucagcuauggucaucuguuccuguuagaaggcuaugcagcauauuauauacuaugcgcauguuaugaaaugcauaauaaaaaauuuuaaaaaaucuaaaagaucuaaaaaaaaaaaaaaaaaaaaaaaaaaaaaaaaaaaaaaaaaaaaaaaaaaaaaaaaaaaaaaaaugcaucccccccccccccccccccccccccccccccaaaggcucuuuucagagccaccagaauu

SEQ ID NO: 20740 - RNA, 1078 nt, Artificial Sequence
  mRNA product Design d-4 comprising derived and/or modified sequence from HRSV(Memphis-37)__AIY60637.1__P (opt5)
gggagagucccgcagucggcguccagcggcucugcuuguucgugugugugucguugcaggccuuauucaagcuuaccauggagaaguucgcccccgaauuucacggcgaggacgcuaacaauagagccaccaaauuccuggaaagcaucaaggggaaauuuacauccccuaaggauccgaaaaagaaggacucuauuaucagcgugaacuccauugauaucgaggucacgaaagaaucucccauuaccagcaauuccacaaucaucaacccuaccaaugagacagacgauaccgcgggaaacaagcccaauuaccagcggaaaccucucguuucuuucaaggaggaccccacaccuagcgauaacccguuuuccaaacuguauaaggaaaccauugagacguucgacaauaacgaagaggagagcucuuacuccuaugaagagaucaaugaucaaaccaacgacaauauuacagcucgccuugauagaaucgacgaaaagcugagcgagauucucggcaugcugcauacccuugugguggccucugccgggcccacauccgcucgggauggaauccgcgacgccauggucggccugagagaagagaugauugagaaaauccggaccgaagcucucaugacgaacgaccgccuggaggccauggcgagacugcggaaugaagagagcgaaaagauggccaaagauacaucugacgaggugucccucaacccuaccagcgagaagcugaacaaucuucuggaagggaacgauuccgacaaugaucucucucuggaggacuuuugaggacuaguggaagcauuuuccuggcugauuaaaagaaauuacucagcuauggucaucuguuccuguuagaaggcuaugcagcauauuauauacuaugcgcauguuaugaaaugcauaauaaaaaauuuuaaaaaaucuaaaagaucuaaaaaaaaaaaaaaaaaaaaaaaaaaaaaaaaaaaaaaaaaaaaaaaaaaaaaaaaaaaaaaaaugcaucccccccccccccccccccccccccccccccaaaggcucuuuucagagccaccagaauu

SEQ ID NO: 20741 - RNA, 1078 nt, Artificial Sequence
  mRNA product Design d-4 comprising derived and/or modified sequence from HRSV(Memphis-37)__AIY60637.1__P (opt6)
gggagagucccgcagucggcguccagcggcucugcuuguucgugugugugucguugcaggccuuauucaagcuuaccauggaaaaauucgcaccagaauuccacggagaagacgcaaacaacagagcaacaaaauuccuagaaucaauaaaaggaaaauucacaagcccaaaagaucccaaaaaaaaagacucaaucauaagcguaaacucaauagauauagaaguaacaaaagaaaguccaauaacaagcaacaguacaauaauaaacccaacaaaugaaacagacgauacagcaggcaacaaaccaaacuaccaaagaaaaccgcuaguaaguuucaaagaagacccaacaccaagcgauaacccauuuucaaaauuauacaaagaaacaauagaaacauucgacaacaacgaagaagaaagcucauacucauacgaagaaauaaacgaccaaacaaacgacaacauaacagcgagauuagacagaauagacgaaaaacuaucagaaauacuaggcauguuacacacauuaguaguagcaagcgcaggaccaacaucagcaagagacggaauccgagacgcaaugguaggacuaagagaagaaaugauagaaaaaauaagaacagaagcacuaaugacaaacgacagacuagaagccauggcaagacuaagaaacgaagaaucagaaaaaauggcaaaagacacaucagacgaaguaucacuaaacccaacaagcgaaaaacuaaacaaccuauuagaaggaaacgacagcgacaacgaccuaucacucgaagacuucuaaggacuaguggaagcauuuuccuggcugauuaaaagaaauuacucagcuauggucaucuguuccuguuagaaggcuaugcagcauauuauauacuaugcgcauguuaugaaaugcauaauaaaaaauuuuaaaaaaucuaaaagaucuaaaaaaaaaaaaaaaaaaaaaaaaaaaaaaaaaaaaaaaaaaaaaaaaaaaaaaaaaaaaaaaaugcaucccccccccccccccccccccccccccccccaaaggcucuuuucagagccaccagaauu

SEQ ID NO: 20742 - RNA, 1078 nt, Artificial Sequence
  mRNA product Design d-4 comprising derived and/or modified sequence from HRSV(Memphis-37)__AIY60637.1__P (opt11)
gggagagucccgcagucggcguccagcggcucugcuuguucgugugugugucguugcaggccuuauucaagcuuaccauggaaaaauucgccccagaauuucacggcgaagacgccaacaaccgagccaccaaauuccucgaaucaauaaaaggcaaauucacaucccccaaagaccccaaaaaaaaagacucgaucaucuccgugaacucaaucgacauagaagucaccaaagaaagccccaucaccuccaacagcaccaucaucaaccccacaaacgaaacagacgacaccgccggcaacaaaccaaacuaccaacgaaaaccccucgucagcuucaaagaagaccccacaccaagcgacaaccccuucuccaaacucuacaaagaaacaauagaaaccuucgacaacaacgaagaagaaagcucguacucauacgaagaaaucaacgaccaaaccaacgacaacaucaccgcccgccucgaccgcaucgacgaaaaacucuccgaaauccucggaaugcuccacacacucgucgucgccagcgccggccccaccucagcccgggacggcauccgcgacgccauggugggccuccgcgaggaaaugaucgaaaaaauccgcacagaagcccucaugaccaacgaccgccucgaagccauggcccgccuccgcaacgaagaauccgaaaaaauggccaaagacaccuccgacgaagucucacuaaaccccaccuccgaaaaacuaaacaaccuccuagaaggcaacgacagcgacaacgaccucucccuagaagacuucuaaggacuaguggaagcauuuuccuggcugauuaaaagaaauuacucagcuauggucaucuguuccuguuagaaggcuaugcagcauauuauauacuaugcgcauguuaugaaaugcauaauaaaaaauuuuaaaaaaucuaaaagaucuaaaaaaaaaaaaaaaaaaaaaaaaaaaaaaaaaaaaaaaaaaaaaaaaaaaaaaaaaaaaaaaaugcaucccccccccccccccccccccccccccccccaaaggcucuuuucagagccaccagaauu

SEQ ID NO: 20743 - RNA, 1175 nt, Artificial Sequence
  mRNA product Design d-5 comprising derived and/or modified sequence from HRSV(Memphis-37)__AIY60637.1__P (wt)
gggagagggcgcuuggcuugcaaggacccugagcugcggcauugaagcacacccaacccaacucgacugaagucagccucacugaaccggaucugagaaucuucucucucugggcuugccagggcucuccgaaccuagcuagcauccucuucaauuccaacuagaaagcuuaccauggaaaaguuugcuccugaauuccauggagaagacgcaaacaacagagccacuaaauuccuagaaucaauaaagggcaaauucacaucaccuaaagaucccaagaaaaaagauaguaucauaucugucaacucaauagauauagaaguaaccaaagaaagcccuauaacuucaaauucaaccauuauaaacccuacaaaugagacagaugauacugcagggaacaagcccaauuaucaaagaaaaccacuagugaguuucaaagaagacccuacgccaagugauaaucccuuuucaaaacuauacaaagaaaccauagaaacauuugauaacaaugaagaagaaucuagcuauucauaugaagaaauaaaugaucagacaaacgauaauauaacagcaagauuagauaggauugaugaaaaauuaagugaaauacuaggaaugcuucacacacuaguaguagcaagugcaggaccuacaucugcucgggaugguauaagagaugccaugguugguuuaagagaagaaaugauagaaaaaaucagaacugaagcauugaugaccaaugauagauuagaagcuauggcaagacucaggaaugaggaaagugaaaagauggcaaaagacacaucagaugaagugucucucaauccaacaucagagaaauugaacaaccuguuggaaggaaaugauagugauaaugaucuaucacuugaagauuucugaggacuaguggaagcauuuuccuggcugauuaaaagaaauuacucagcuauggucaucuguuccuguuagaaggcuaugcagcauauuauauacuaugcgcauguuaugaaaugcauaauaaaaaauuuuaaaaaaucuaaaagaucuaaaaaaaaaaaaaaaaaaaaaaaaaaaaaaaaaaaaaaaaaaaaaaaaaaaaaaaaaaaaaaaaugcaucccccccccccccccccccccccccccccccaaaggcucuuuucagagccaccagaauu

SEQ ID NO: 20744 - RNA, 1175 nt, Artificial Sequence
  mRNA product Design d-5 comprising derived and/or modified sequence from HRSV(Memphis-37)__AIY60637.1__P (opt1)
gggagagggcgcuuggcuugcaaggacccugagcugcggcauugaagcacacccaacccaacucgacugaagucagccucacugaaccggaucugagaaucuucucucucugggcuugccagggcucuccgaaccuagcuagcauccucuucaauuccaacuagaaagcuuaccauggagaaguucgcccccgaguuccacggcgaggacgccaacaaccgcgcgaccaaguuccuggagagcaucaaggggaaguucaccuccccgaaggaccccaagaagaaggacagcaucaucuccgugaacagcaucgacaucgaggucacgaaggagucccccaucaccagcaacuccaccaucaucaaccccaccaacgagacggacgacaccgccggcaacaagccgaacuaccagcggaagccccucgugagcuucaaggaggaccccacccccuccgacaacccguucagcaagcuguacaaggagaccaucgagacguucgacaacaacgaggaggaguccagcuacuccuacgaggagaucaacgaccagaccaacgacaacaucaccgcccgccuggaccggaucgacgagaagcucagcgagauccuggggaugcugcacacccucguggucgccuccgccggccccacgagcgcgcgcgacgggauccgggacgccauggugggccugcgcgaggagaugaucgagaagauccggaccgaggcccugaugaccaacgaccgccucgaggccauggcgcggcugcgcaacgaggaguccgagaagauggccaaggacaccagcgacgaggugucccugaaccccacgagcgagaagcucaacaaccugcuggagggcaacgacagcgacaacgaccucucccuggaggacuucugaggacuaguggaagcauuuuccuggcugauuaaaagaaauuacucagcuauggucaucuguuccuguuagaaggcuaugcagcauauuauauacuaugcgcauguuaugaaaugcauaauaaaaaauuuuaaaaaaucuaaaagaucuaaaaaaaaaaaaaaaaaaaaaaaaaaaaaaaaaaaaaaaaaaaaaaaaaaaaaaaaaaaaaaaaugcaucccccccccccccccccccccccccccccccaaaggcucuuuucagagccaccagaauu

SEQ ID NO: 20745 - RNA, 1175 nt, Artificial Sequence
  mRNA product Design d-5 comprising derived and/or modified sequence from HRSV(Memphis-37)__AIY60637.1__P (opt2)
gggagagggcgcuuggcuugcaaggacccugagcugcggcauugaagcacacccaacccaacucgacugaagucagccucacugaaccggaucugagaaucuucucucucugggcuugccagggcucuccgaaccuagcuagcauccucuucaauuccaacuagaaagcuuaccauggagaaguucgcccccgaguuccacggcgaggacgccaacaaccgcgccaccaaguuccucgaguccaucaagggcaaguucaccucccccaaggaccccaagaagaaggacuccaucaucuccgucaacuccaucgacaucgaggucaccaaggagucccccaucaccuccaacuccaccaucaucaaccccaccaacgagaccgacgacaccgccggcaacaagcccaacuaccagcgcaagccccucgucuccuucaaggaggaccccacccccuccgacaaccccuucuccaagcucuacaaggagaccaucgagaccuucgacaacaacgaggaggaguccuccuacuccuacgaggagaucaacgaccagaccaacgacaacaucaccgcccgccucgaccgcaucgacgagaagcucuccgagauccucggcaugcuccacacccucgucgucgccuccgccggccccaccuccgcccgcgacggcauccgcgacgccauggucggccuccgcgaggagaugaucgagaagauccgcaccgaggcccucaugaccaacgaccgccucgaggccauggcccgccuccgcaacgaggaguccgagaagauggccaaggacaccuccgacgaggucucccucaaccccaccuccgagaagcucaacaaccuccucgagggcaacgacuccgacaacgaccucucccucgaggacuucugaggacuaguggaagcauuuuccuggcugauuaaaagaaauuacucagcuauggucaucuguuccuguuagaaggcuaugcagcauauuauauacuaugcgcauguuaugaaaugcauaauaaaaaauuuuaaaaaaucuaaaagaucuaaaaaaaaaaaaaaaaaaaaaaaaaaaaaaaaaaaaaaaaaaaaaaaaaaaaaaaaaaaaaaaaugcaucccccccccccccccccccccccccccccccaaaggcucuuuucagagccaccagaauu

SEQ ID NO: 20746 - RNA, 1175 nt, Artificial Sequence
  mRNA product Design d-5 comprising derived and/or modified sequence from HRSV(Memphis-37)__AIY60637.1__P (opt3)
gggagagggcgcuuggcuugcaaggacccugagcugcggcauugaagcacacccaacccaacucgacugaagucagccucacugaaccggaucugagaaucuucucucucugggcuugccagggcucuccgaaccuagcuagcauccucuucaauuccaacuagaaagcuuaccauggagaaguucgcccccgaauuucacggcgaggacgcuaacaauagagcaaccaaauuccuggaaagcaucaaggggaaauuuacauccccuaaggauccgaaaaagaaggacucuauuauaucagugaacaguaucgauauugaggucacuaaagaaagcccaaucacguccaauucuaccauuaucaaccccacaaaugagacugacgauaccgccggaaacaagccuaauuaccagaggaaaccacucguuucguucaaggaggaccccacaccuucagauaacccauuuagcaaacuuuauaaggaaaccauagagacuuucgacaauaacgaagaggagaguuccuacucuuaugaagagaucaaugaucaaacaaacgacaauauuaccgcgcggcuggaucgcaucgacgaaaaguugagcgagauuuuagguaugcugcauacgcuagugguagcuuccgccggccccacuucagcacgagaugggauccgugacgccauggugggacucagagaagagaugauagagaaaauuaggaccgaagcucugaugacaaacgaccggcuugaggcaauggcccgccugagaaaugaagagagugaaaagauggcuaaagauacuagcgacgaggucucuuugaacccuaccuccgagaagcucaacaaucugcuggaaggcaacgauucagacaaugaucucagcuuagaggacuuuugaggacuaguggaagcauuuuccuggcugauuaaaagaaauuacucagcuauggucaucuguuccuguuagaaggcuaugcagcauauuauauacuaugcgcauguuaugaaaugcauaauaaaaaauuuuaaaaaaucuaaaagaucuaaaaaaaaaaaaaaaaaaaaaaaaaaaaaaaaaaaaaaaaaaaaaaaaaaaaaaaaaaaaaaaaugcaucccccccccccccccccccccccccccccccaaaggcucuuuucagagccaccagaauu

SEQ ID NO: 20747 - RNA, 1175 nt, Artificial Sequence
  mRNA product Design d-5 comprising derived and/or modified sequence from HRSV(Memphis-37)__AIY60637.1__P (opt4)
gggagagggcgcuuggcuugcaaggacccugagcugcggcauugaagcacacccaacccaacucgacugaagucagccucacugaaccggaucugagaaucuucucucucugggcuugccagggcucuccgaaccuagcuagcauccucuucaauuccaacuagaaagcuuaccauggagaaguucgcccccgaguuccacggcgaggacgccaacaacagagccaccaaguuccuggagagcaucaagggcaaguucaccagccccaaggaccccaagaagaaggacagcaucaucagcgugaacagcaucgacaucgaggugaccaaggagagccccaucaccagcaacagcaccaucaucaaccccaccaacgagaccgacgacaccgccggcaacaagcccaacuaccagagaaagccccuggugagcuucaaggaggaccccacccccagcgacaaccccuucagcaagcuguacaaggagaccaucgagaccuucgacaacaacgaggaggagagcagcuacagcuacgaggagaucaacgaccagaccaacgacaacaucaccgccagacuggacagaaucgacgagaagcugagcgagauccugggcaugcugcacacccuggugguggccagcgccggccccaccagcgccagagacggcaucagagacgccauggugggccugagagaggagaugaucgagaagaucagaaccgaggcccugaugaccaacgacagacuggaggccauggccagacugagaaacgaggagagcgagaagauggccaaggacaccagcgacgaggugagccugaaccccaccagcgagaagcugaacaaccugcuggagggcaacgacagcgacaacgaccugagccuggaggacuucugaggacuaguggaagcauuuuccuggcugauuaaaagaaauuacucagcuauggucaucuguuccuguuagaaggcuaugcagcauauuauauacuaugcgcauguuaugaaaugcauaauaaaaaauuuuaaaaaaucuaaaagaucuaaaaaaaaaaaaaaaaaaaaaaaaaaaaaaaaaaaaaaaaaaaaaaaaaaaaaaaaaaaaaaaaugcaucccccccccccccccccccccccccccccccaaaggcucuuuucagagccaccagaauu

SEQ ID NO: 20748 - RNA, 1175 nt, Artificial Sequence
  mRNA product Design d-5 comprising derived and/or modified sequence from HRSV(Memphis-37)__AIY60637.1__P (opt5)
gggagagggcgcuuggcuugcaaggacccugagcugcggcauugaagcacacccaacccaacucgacugaagucagccucacugaaccggaucugagaaucuucucucucugggcuugccagggcucuccgaaccuagcuagcauccucuucaauuccaacuagaaagcuuaccauggagaaguucgcccccgaauuucacggcgaggacgcuaacaauagagccaccaaauuccuggaaagcaucaaggggaaauuuacauccccuaaggauccgaaaaagaaggacucuauuaucagcgugaacuccauugauaucgaggucacgaaagaaucucccauuaccagcaauuccacaaucaucaacccuaccaaugagacagacgauaccgcgggaaacaagcccaauuaccagcggaaaccucucguuucuuucaaggaggaccccacaccuagcgauaacccguuuuccaaacuguauaaggaaaccauugagacguucgacaauaacgaagaggagagcucuuacuccuaugaagagaucaaugaucaaaccaacgacaauauuacagcucgccuugauagaaucgacgaaaagcugagcgagauucucggcaugcugcauacccuugugguggccucugccgggcccacauccgcucgggauggaauccgcgacgccauggucggccugagagaagagaugauugagaaaauccggaccgaagcucucaugacgaacgaccgccuggaggccauggcgagacugcggaaugaagagagcgaaaagauggccaaagauacaucugacgaggugucccucaacccuaccagcgagaagcugaacaaucuucuggaagggaacgauuccgacaaugaucucucucuggaggacuuuugaggacuaguggaagcauuuuccuggcugauuaaaagaaauuacucagcuauggucaucuguuccuguuagaaggcuaugcagcauauuauauacuaugcgcauguuaugaaaugcauaauaaaaaauuuuaaaaaaucuaaaagaucuaaaaaaaaaaaaaaaaaaaaaaaaaaaaaaaaaaaaaaaaaaaaaaaaaaaaaaaaaaaaaaaaugcaucccccccccccccccccccccccccccccccaaaggcucuuuucagagccaccagaauu

SEQ ID NO: 20749 - RNA, 1175 nt, Artificial Sequence
  mRNA product Design d-5 comprising derived and/or modified sequence from HRSV(Memphis-37)__AIY60637.1__P (opt6)
gggagagggcgcuuggcuugcaaggacccugagcugcggcauugaagcacacccaacccaacucgacugaagucagccucacugaaccggaucugagaaucuucucucucugggcuugccagggcucuccgaaccuagcuagcauccucuucaauuccaacuagaaagcuuaccauggaaaaauucgcaccagaauuccacggagaagacgcaaacaacagagcaacaaaauuccuagaaucaauaaaaggaaaauucacaagcccaaaagaucccaaaaaaaaagacucaaucauaagcguaaacucaauagauauagaaguaacaaaagaaaguccaauaacaagcaacaguacaauaauaaacccaacaaaugaaacagacgauacagcaggcaacaaaccaaacuaccaaagaaaaccgcuaguaaguuucaaagaagacccaacaccaagcgauaacccauuuucaaaauuauacaaagaaacaauagaaacauucgacaacaacgaagaagaaagcucauacucauacgaagaaauaaacgaccaaacaaacgacaacauaacagcgagauuagacagaauagacgaaaaacuaucagaaauacuaggcauguuacacacauuaguaguagcaagcgcaggaccaacaucagcaagagacggaauccgagacgcaaugguaggacuaagagaagaaaugauagaaaaaauaagaacagaagcacuaaugacaaacgacagacuagaagccauggcaagacuaagaaacgaagaaucagaaaaaauggcaaaagacacaucagacgaaguaucacuaaacccaacaagcgaaaaacuaaacaaccuauuagaaggaaacgacagcgacaacgaccuaucacucgaagacuucuaaggacuaguggaagcauuuuccuggcugauuaaaagaaauuacucagcuauggucaucuguuccuguuagaaggcuaugcagcauauuauauacuaugcgcauguuaugaaaugcauaauaaaaaauuuuaaaaaaucuaaaagaucuaaaaaaaaaaaaaaaaaaaaaaaaaaaaaaaaaaaaaaaaaaaaaaaaaaaaaaaaaaaaaaaaugcaucccccccccccccccccccccccccccccccaaaggcucuuuucagagccaccagaauu

SEQ ID NO: 20750 - RNA, 1175 nt, Artificial Sequence
  mRNA product Design d-5 comprising derived and/or modified sequence from HRSV(Memphis-37)__AIY60637.1__P (opt11)
gggagagggcgcuuggcuugcaaggacccugagcugcggcauugaagcacacccaacccaacucgacugaagucagccucacugaaccggaucugagaaucuucucucucugggcuugccagggcucuccgaaccuagcuagcauccucuucaauuccaacuagaaagcuuaccauggaaaaauucgccccagaauuucacggcgaagacgccaacaaccgagccaccaaauuccucgaaucaauaaaaggcaaauucacaucccccaaagaccccaaaaaaaaagacucgaucaucuccgugaacucaaucgacauagaagucaccaaagaaagccccaucaccuccaacagcaccaucaucaaccccacaaacgaaacagacgacaccgccggcaacaaaccaaacuaccaacgaaaaccccucgucagcuucaaagaagaccccacaccaagcgacaaccccuucuccaaacucuacaaagaaacaauagaaaccuucgacaacaacgaagaagaaagcucguacucauacgaagaaaucaacgaccaaaccaacgacaacaucaccgcccgccucgaccgcaucgacgaaaaacucuccgaaauccucggaaugcuccacacacucgucgucgccagcgccggccccaccucagcccgggacggcauccgcgacgccauggugggccuccgcgaggaaaugaucgaaaaaauccgcacagaagcccucaugaccaacgaccgccucgaagccauggcccgccuccgcaacgaagaauccgaaaaaauggccaaagacaccuccgacgaagucucacuaaaccccaccuccgaaaaacuaaacaaccuccuagaaggcaacgacagcgacaacgaccucucccuagaagacuucuaaggacuaguggaagcauuuuccuggcugauuaaaagaaauuacucagcuauggucaucuguuccuguuagaaggcuaugcagcauauuauauacuaugcgcauguuaugaaaugcauaauaaaaaauuuuaaaaaaucuaaaagaucuaaaaaaaaaaaaaaaaaaaaaaaaaaaaaaaaaaaaaaaaaaaaaaaaaaaaaaaaaaaaaaaaugcaucccccccccccccccccccccccccccccccaaaggcucuuuucagagccaccagaauu

SEQ ID NO: 20751 - RNA, 1055 nt, Artificial Sequence
  mRNA product Design e-1 comprising derived and/or modified sequence from HRSV(Memphis-37)__AIY60637.1__P (wt)
gggagaauauaagcguuggcggagcgucgguuguagcacucugcgcgcccgcucuucugcugcuguuugucuacuuccuccugcuuccccgccgccgccgccgccaucaagcuuaccauggaaaaguuugcuccugaauuccauggagaagacgcaaacaacagagccacuaaauuccuagaaucaauaaagggcaaauucacaucaccuaaagaucccaagaaaaaagauaguaucauaucugucaacucaauagauauagaaguaaccaaagaaagcccuauaacuucaaauucaaccauuauaaacccuacaaaugagacagaugauacugcagggaacaagcccaauuaucaaagaaaaccacuagugaguuucaaagaagacccuacgccaagugauaaucccuuuucaaaacuauacaaagaaaccauagaaacauuugauaacaaugaagaagaaucuagcuauucauaugaagaaauaaaugaucagacaaacgauaauauaacagcaagauuagauaggauugaugaaaaauuaagugaaauacuaggaaugcuucacacacuaguaguagcaagugcaggaccuacaucugcucgggaugguauaagagaugccaugguugguuuaagagaagaaaugauagaaaaaaucagaacugaagcauugaugaccaaugauagauuagaagcuauggcaagacucaggaaugaggaaagugaaaagauggcaaaagacacaucagaugaagugucucucaauccaacaucagagaaauugaacaaccuguuggaaggaaaugauagugauaaugaucuaucacuugaagauuucugaggacuaguguccaccugucccuccugggcugcuggauugucucguuuuccugccaaauaaacaggaucagcgcuuuacagaucuaaaaaaaaaaaaaaaaaaaaaaaaaaaaaaaaaaaaaaaaaaaaaaaaaaaaaaaaaaaaaaaaugcaucccccccccccccccccccccccccccccccaaaggcucuuuucagagccaccagaauu

SEQ ID NO: 20752 - RNA, 1055 nt, Artificial Sequence
  mRNA product Design e-1 comprising derived and/or modified sequence from HRSV(Memphis-37)__AIY60637.1__P (opt1)
gggagaauauaagcguuggcggagcgucgguuguagcacucugcgcgcccgcucuucugcugcuguuugucuacuuccuccugcuuccccgccgccgccgccgccaucaagcuuaccauggagaaguucgcccccgaguuccacggcgaggacgccaacaaccgcgcgaccaaguuccuggagagcaucaaggggaaguucaccuccccgaaggaccccaagaagaaggacagcaucaucuccgugaacagcaucgacaucgaggucacgaaggagucccccaucaccagcaacuccaccaucaucaaccccaccaacgagacggacgacaccgccggcaacaagccgaacuaccagcggaagccccucgugagcuucaaggaggaccccacccccuccgacaacccguucagcaagcuguacaaggagaccaucgagacguucgacaacaacgaggaggaguccagcuacuccuacgaggagaucaacgaccagaccaacgacaacaucaccgcccgccuggaccggaucgacgagaagcucagcgagauccuggggaugcugcacacccucguggucgccuccgccggccccacgagcgcgcgcgacgggauccgggacgccauggugggccugcgcgaggagaugaucgagaagauccggaccgaggcccugaugaccaacgaccgccucgaggccauggcgcggcugcgcaacgaggaguccgagaagauggccaaggacaccagcgacgaggugucccugaaccccacgagcgagaagcucaacaaccugcuggagggcaacgacagcgacaacgaccucucccuggaggacuucugaggacuaguguccaccugucccuccugggcugcuggauugucucguuuuccugccaaauaaacaggaucagcgcuuuacagaucuaaaaaaaaaaaaaaaaaaaaaaaaaaaaaaaaaaaaaaaaaaaaaaaaaaaaaaaaaaaaaaaaugcaucccccccccccccccccccccccccccccccaaaggcucuuuucagagccaccagaauu

SEQ ID NO: 20753 - RNA, 1055 nt, Artificial Sequence
  mRNA product Design e-1 comprising derived and/or modified sequence from HRSV(Memphis-37)__AIY60637.1__P (opt2)
gggagaauauaagcguuggcggagcgucgguuguagcacucugcgcgcccgcucuucugcugcuguuugucuacuuccuccugcuuccccgccgccgccgccgccaucaagcuuaccauggagaaguucgcccccgaguuccacggcgaggacgccaacaaccgcgccaccaaguuccucgaguccaucaagggcaaguucaccucccccaaggaccccaagaagaaggacuccaucaucuccgucaacuccaucgacaucgaggucaccaaggagucccccaucaccuccaacuccaccaucaucaaccccaccaacgagaccgacgacaccgccggcaacaagcccaacuaccagcgcaagccccucgucuccuucaaggaggaccccacccccuccgacaaccccuucuccaagcucuacaaggagaccaucgagaccuucgacaacaacgaggaggaguccuccuacuccuacgaggagaucaacgaccagaccaacgacaacaucaccgcccgccucgaccgcaucgacgagaagcucuccgagauccucggcaugcuccacacccucgucgucgccuccgccggccccaccuccgcccgcgacggcauccgcgacgccauggucggccuccgcgaggagaugaucgagaagauccgcaccgaggcccucaugaccaacgaccgccucgaggccauggcccgccuccgcaacgaggaguccgagaagauggccaaggacaccuccgacgaggucucccucaaccccaccuccgagaagcucaacaaccuccucgagggcaacgacuccgacaacgaccucucccucgaggacuucugaggacuaguguccaccugucccuccugggcugcuggauugucucguuuuccugccaaauaaacaggaucagcgcuuuacagaucuaaaaaaaaaaaaaaaaaaaaaaaaaaaaaaaaaaaaaaaaaaaaaaaaaaaaaaaaaaaaaaaaugcaucccccccccccccccccccccccccccccccaaaggcucuuuucagagccaccagaauu

SEQ ID NO: 20754 - RNA, 1055 nt, Artificial Sequence
  mRNA product Design e-1 comprising derived and/or modified sequence from HRSV(Memphis-37)__AIY60637.1__P (opt3)
gggagaauauaagcguuggcggagcgucgguuguagcacucugcgcgcccgcucuucugcugcuguuugucuacuuccuccugcuuccccgccgccgccgccgccaucaagcuuaccauggagaaguucgcccccgaauuucacggcgaggacgcuaacaauagagcaaccaaauuccuggaaagcaucaaggggaaauuuacauccccuaaggauccgaaaaagaaggacucuauuauaucagugaacaguaucgauauugaggucacuaaagaaagcccaaucacguccaauucuaccauuaucaaccccacaaaugagacugacgauaccgccggaaacaagccuaauuaccagaggaaaccacucguuucguucaaggaggaccccacaccuucagauaacccauuuagcaaacuuuauaaggaaaccauagagacuuucgacaauaacgaagaggagaguuccuacucuuaugaagagaucaaugaucaaacaaacgacaauauuaccgcgcggcuggaucgcaucgacgaaaaguugagcgagauuuuagguaugcugcauacgcuagugguagcuuccgccggccccacuucagcacgagaugggauccgugacgccauggugggacucagagaagagaugauagagaaaauuaggaccgaagcucugaugacaaacgaccggcuugaggcaauggcccgccugagaaaugaagagagugaaaagauggcuaaagauacuagcgacgaggucucuuugaacccuaccuccgagaagcucaacaaucugcuggaaggcaacgauucagacaaugaucucagcuuagaggacuuuugaggacuaguguccaccugucccuccugggcugcuggauugucucguuuuccugccaaauaaacaggaucagcgcuuuacagaucuaaaaaaaaaaaaaaaaaaaaaaaaaaaaaaaaaaaaaaaaaaaaaaaaaaaaaaaaaaaaaaaaugcaucccccccccccccccccccccccccccccccaaaggcucuuuucagagccaccagaauu

SEQ ID NO: 20755 - RNA, 1055 nt, Artificial Sequence
  mRNA product Design e-1 comprising derived and/or modified sequence from HRSV(Memphis-37)__AIY60637.1__P (opt4)
gggagaauauaagcguuggcggagcgucgguuguagcacucugcgcgcccgcucuucugcugcuguuugucuacuuccuccugcuuccccgccgccgccgccgccaucaagcuuaccauggagaaguucgcccccgaguuccacggcgaggacgccaacaacagagccaccaaguuccuggagagcaucaagggcaaguucaccagccccaaggaccccaagaagaaggacagcaucaucagcgugaacagcaucgacaucgaggugaccaaggagagccccaucaccagcaacagcaccaucaucaaccccaccaacgagaccgacgacaccgccggcaacaagcccaacuaccagagaaagccccuggugagcuucaaggaggaccccacccccagcgacaaccccuucagcaagcuguacaaggagaccaucgagaccuucgacaacaacgaggaggagagcagcuacagcuacgaggagaucaacgaccagaccaacgacaacaucaccgccagacuggacagaaucgacgagaagcugagcgagauccugggcaugcugcacacccuggugguggccagcgccggccccaccagcgccagagacggcaucagagacgccauggugggccugagagaggagaugaucgagaagaucagaaccgaggcccugaugaccaacgacagacuggaggccauggccagacugagaaacgaggagagcgagaagauggccaaggacaccagcgacgaggugagccugaaccccaccagcgagaagcugaacaaccugcuggagggcaacgacagcgacaacgaccugagccuggaggacuucugaggacuaguguccaccugucccuccugggcugcuggauugucucguuuuccugccaaauaaacaggaucagcgcuuuacagaucuaaaaaaaaaaaaaaaaaaaaaaaaaaaaaaaaaaaaaaaaaaaaaaaaaaaaaaaaaaaaaaaaugcaucccccccccccccccccccccccccccccccaaaggcucuuuucagagccaccagaauu

SEQ ID NO: 20756 - RNA, 1055 nt, Artificial Sequence
  mRNA product Design e-1 comprising derived and/or modified sequence from HRSV(Memphis-37)__AIY60637.1__P (opt5)
gggagaauauaagcguuggcggagcgucgguuguagcacucugcgcgcccgcucuucugcugcuguuugucuacuuccuccugcuuccccgccgccgccgccgccaucaagcuuaccauggagaaguucgcccccgaauuucacggcgaggacgcuaacaauagagccaccaaauuccuggaaagcaucaaggggaaauuuacauccccuaaggauccgaaaaagaaggacucuauuaucagcgugaacuccauugauaucgaggucacgaaagaaucucccauuaccagcaauuccacaaucaucaacccuaccaaugagacagacgauaccgcgggaaacaagcccaauuaccagcggaaaccucucguuucuuucaaggaggaccccacaccuagcgauaacccguuuuccaaacuguauaaggaaaccauugagacguucgacaauaacgaagaggagagcucuuacuccuaugaagagaucaaugaucaaaccaacgacaauauuacagcucgccuugauagaaucgacgaaaagcugagcgagauucucggcaugcugcauacccuugugguggccucugccgggcccacauccgcucgggauggaauccgcgacgccauggucggccugagagaagagaugauugagaaaauccggaccgaagcucucaugacgaacgaccgccuggaggccauggcgagacugcggaaugaagagagcgaaaagauggccaaagauacaucugacgaggugucccucaacccuaccagcgagaagcugaacaaucuucuggaagggaacgauuccgacaaugaucucucucuggaggacuuuugaggacuaguguccaccugucccuccugggcugcuggauugucucguuuuccugccaaauaaacaggaucagcgcuuuacagaucuaaaaaaaaaaaaaaaaaaaaaaaaaaaaaaaaaaaaaaaaaaaaaaaaaaaaaaaaaaaaaaaaugcaucccccccccccccccccccccccccccccccaaaggcucuuuucagagccaccagaauu

SEQ ID NO: 20757 - RNA, 1055 nt, Artificial Sequence
  mRNA product Design e-1 comprising derived and/or modified sequence from HRSV(Memphis-37)__AIY60637.1__P (opt6)
gggagaauauaagcguuggcggagcgucgguuguagcacucugcgcgcccgcucuucugcugcuguuugucuacuuccuccugcuuccccgccgccgccgccgccaucaagcuuaccauggaaaaauucgcaccagaauuccacggagaagacgcaaacaacagagcaacaaaauuccuagaaucaauaaaaggaaaauucacaagcccaaaagaucccaaaaaaaaagacucaaucauaagcguaaacucaauagauauagaaguaacaaaagaaaguccaauaacaagcaacaguacaauaauaaacccaacaaaugaaacagacgauacagcaggcaacaaaccaaacuaccaaagaaaaccgcuaguaaguuucaaagaagacccaacaccaagcgauaacccauuuucaaaauuauacaaagaaacaauagaaacauucgacaacaacgaagaagaaagcucauacucauacgaagaaauaaacgaccaaacaaacgacaacauaacagcgagauuagacagaauagacgaaaaacuaucagaaauacuaggcauguuacacacauuaguaguagcaagcgcaggaccaacaucagcaagagacggaauccgagacgcaaugguaggacuaagagaagaaaugauagaaaaaauaagaacagaagcacuaaugacaaacgacagacuagaagccauggcaagacuaagaaacgaagaaucagaaaaaauggcaaaagacacaucagacgaaguaucacuaaacccaacaagcgaaaaacuaaacaaccuauuagaaggaaacgacagcgacaacgaccuaucacucgaagacuucuaaggacuaguguccaccugucccuccugggcugcuggauugucucguuuuccugccaaauaaacaggaucagcgcuuuacagaucuaaaaaaaaaaaaaaaaaaaaaaaaaaaaaaaaaaaaaaaaaaaaaaaaaaaaaaaaaaaaaaaaugcaucccccccccccccccccccccccccccccccaaaggcucuuuucagagccaccagaauu

SEQ ID NO: 20758 - RNA, 1055 nt, Artificial Sequence
  mRNA product Design e-1 comprising derived and/or modified sequence from HRSV(Memphis-37)__AIY60637.1__P (opt11)
gggagaauauaagcguuggcggagcgucgguuguagcacucugcgcgcccgcucuucugcugcuguuugucuacuuccuccugcuuccccgccgccgccgccgccaucaagcuuaccauggaaaaauucgccccagaauuucacggcgaagacgccaacaaccgagccaccaaauuccucgaaucaauaaaaggcaaauucacaucccccaaagaccccaaaaaaaaagacucgaucaucuccgugaacucaaucgacauagaagucaccaaagaaagccccaucaccuccaacagcaccaucaucaaccccacaaacgaaacagacgacaccgccggcaacaaaccaaacuaccaacgaaaaccccucgucagcuucaaagaagaccccacaccaagcgacaaccccuucuccaaacucuacaaagaaacaauagaaaccuucgacaacaacgaagaagaaagcucguacucauacgaagaaaucaacgaccaaaccaacgacaacaucaccgcccgccucgaccgcaucgacgaaaaacucuccgaaauccucggaaugcuccacacacucgucgucgccagcgccggccccaccucagcccgggacggcauccgcgacgccauggugggccuccgcgaggaaaugaucgaaaaaauccgcacagaagcccucaugaccaacgaccgccucgaagccauggcccgccuccgcaacgaagaauccgaaaaaauggccaaagacaccuccgacgaagucucacuaaaccccaccuccgaaaaacuaaacaaccuccuagaaggcaacgacagcgacaacgaccucucccuagaagacuucuaaggacuaguguccaccugucccuccugggcugcuggauugucucguuuuccugccaaauaaacaggaucagcgcuuuacagaucuaaaaaaaaaaaaaaaaaaaaaaaaaaaaaaaaaaaaaaaaaaaaaaaaaaaaaaaaaaaaaaaaugcaucccccccccccccccccccccccccccccccaaaggcucuuuucagagccaccagaauu

SEQ ID NO: 20759 - RNA, 1037 nt, Artificial Sequence
  mRNA product Design e-2 comprising derived and/or modified sequence from HRSV(Memphis-37)__AIY60637.1__P (wt)
gggagacccgugacccggaaguuguacggcuacgcgacuuucccucccacaaacccucgcgcccuuccuuuccuacuugggcccggcagaaagcuuaccauggaaaaguuugcuccugaauuccauggagaagacgcaaacaacagagccacuaaauuccuagaaucaauaaagggcaaauucacaucaccuaaagaucccaagaaaaaagauaguaucauaucugucaacucaauagauauagaaguaaccaaagaaagcccuauaacuucaaauucaaccauuauaaacccuacaaaugagacagaugauacugcagggaacaagcccaauuaucaaagaaaaccacuagugaguuucaaagaagacccuacgccaagugauaaucccuuuucaaaacuauacaaagaaaccauagaaacauuugauaacaaugaagaagaaucuagcuauucauaugaagaaauaaaugaucagacaaacgauaauauaacagcaagauuagauaggauugaugaaaaauuaagugaaauacuaggaaugcuucacacacuaguaguagcaagugcaggaccuacaucugcucgggaugguauaagagaugccaugguugguuuaagagaagaaaugauagaaaaaaucagaacugaagcauugaugaccaaugauagauuagaagcuauggcaagacucaggaaugaggaaagugaaaagauggcaaaagacacaucagaugaagugucucucaauccaacaucagagaaauugaacaaccuguuggaaggaaaugauagugauaaugaucuaucacuugaagauuucugaggacuaguguccaccugucccuccugggcugcuggauugucucguuuuccugccaaauaaacaggaucagcgcuuuacagaucuaaaaaaaaaaaaaaaaaaaaaaaaaaaaaaaaaaaaaaaaaaaaaaaaaaaaaaaaaaaaaaaaugcaucccccccccccccccccccccccccccccccaaaggcucuuuucagagccaccagaauu

SEQ ID NO: 20760 - RNA, 1037 nt, Artificial Sequence
  mRNA product Design e-2 comprising derived and/or modified sequence from HRSV(Memphis-37)__AIY60637.1__P (opt1)
gggagacccgugacccggaaguuguacggcuacgcgacuuucccucccacaaacccucgcgcccuuccuuuccuacuugggcccggcagaaagcuuaccauggagaaguucgcccccgaguuccacggcgaggacgccaacaaccgcgcgaccaaguuccuggagagcaucaaggggaaguucaccuccccgaaggaccccaagaagaaggacagcaucaucuccgugaacagcaucgacaucgaggucacgaaggagucccccaucaccagcaacuccaccaucaucaaccccaccaacgagacggacgacaccgccggcaacaagccgaacuaccagcggaagccccucgugagcuucaaggaggaccccacccccuccgacaacccguucagcaagcuguacaaggagaccaucgagacguucgacaacaacgaggaggaguccagcuacuccuacgaggagaucaacgaccagaccaacgacaacaucaccgcccgccuggaccggaucgacgagaagcucagcgagauccuggggaugcugcacacccucguggucgccuccgccggccccacgagcgcgcgcgacgggauccgggacgccauggugggccugcgcgaggagaugaucgagaagauccggaccgaggcccugaugaccaacgaccgccucgaggccauggcgcggcugcgcaacgaggaguccgagaagauggccaaggacaccagcgacgaggugucccugaaccccacgagcgagaagcucaacaaccugcuggagggcaacgacagcgacaacgaccucucccuggaggacuucugaggacuaguguccaccugucccuccugggcugcuggauugucucguuuuccugccaaauaaacaggaucagcgcuuuacagaucuaaaaaaaaaaaaaaaaaaaaaaaaaaaaaaaaaaaaaaaaaaaaaaaaaaaaaaaaaaaaaaaaugcaucccccccccccccccccccccccccccccccaaaggcucuuuucagagccaccagaauu

SEQ ID NO: 20761 - RNA, 1037 nt, Artificial Sequence
  mRNA product Design e-2 comprising derived and/or modified sequence from HRSV(Memphis-37)__AIY60637.1__P (opt2)
gggagacccgugacccggaaguuguacggcuacgcgacuuucccucccacaaacccucgcgcccuuccuuuccuacuugggcccggcagaaagcuuaccauggagaaguucgcccccgaguuccacggcgaggacgccaacaaccgcgccaccaaguuccucgaguccaucaagggcaaguucaccucccccaaggaccccaagaagaaggacuccaucaucuccgucaacuccaucgacaucgaggucaccaaggagucccccaucaccuccaacuccaccaucaucaaccccaccaacgagaccgacgacaccgccggcaacaagcccaacuaccagcgcaagccccucgucuccuucaaggaggaccccacccccuccgacaaccccuucuccaagcucuacaaggagaccaucgagaccuucgacaacaacgaggaggaguccuccuacuccuacgaggagaucaacgaccagaccaacgacaacaucaccgcccgccucgaccgcaucgacgagaagcucuccgagauccucggcaugcuccacacccucgucgucgccuccgccggccccaccuccgcccgcgacggcauccgcgacgccauggucggccuccgcgaggagaugaucgagaagauccgcaccgaggcccucaugaccaacgaccgccucgaggccauggcccgccuccgcaacgaggaguccgagaagauggccaaggacaccuccgacgaggucucccucaaccccaccuccgagaagcucaacaaccuccucgagggcaacgacuccgacaacgaccucucccucgaggacuucugaggacuaguguccaccugucccuccugggcugcuggauugucucguuuuccugccaaauaaacaggaucagcgcuuuacagaucuaaaaaaaaaaaaaaaaaaaaaaaaaaaaaaaaaaaaaaaaaaaaaaaaaaaaaaaaaaaaaaaaugcaucccccccccccccccccccccccccccccccaaaggcucuuuucagagccaccagaauu

SEQ ID NO: 20762 - RNA, 1037 nt, Artificial Sequence
  mRNA product Design e-2 comprising derived and/or modified sequence from HRSV(Memphis-37)__AIY60637.1__P (opt3)
gggagacccgugacccggaaguuguacggcuacgcgacuuucccucccacaaacccucgcgcccuuccuuuccuacuugggcccggcagaaagcuuaccauggagaaguucgcccccgaauuucacggcgaggacgcuaacaauagagcaaccaaauuccuggaaagcaucaaggggaaauuuacauccccuaaggauccgaaaaagaaggacucuauuauaucagugaacaguaucgauauugaggucacuaaagaaagcccaaucacguccaauucuaccauuaucaaccccacaaaugagacugacgauaccgccggaaacaagccuaauuaccagaggaaaccacucguuucguucaaggaggaccccacaccuucagauaacccauuuagcaaacuuuauaaggaaaccauagagacuuucgacaauaacgaagaggagaguuccuacucuuaugaagagaucaaugaucaaacaaacgacaauauuaccgcgcggcuggaucgcaucgacgaaaaguugagcgagauuuuagguaugcugcauacgcuagugguagcuuccgccggccccacuucagcacgagaugggauccgugacgccauggugggacucagagaagagaugauagagaaaauuaggaccgaagcucugaugacaaacgaccggcuugaggcaauggcccgccugagaaaugaagagagugaaaagauggcuaaagauacuagcgacgaggucucuuugaacccuaccuccgagaagcucaacaaucugcuggaaggcaacgauucagacaaugaucucagcuuagaggacuuuugaggacuaguguccaccugucccuccugggcugcuggauugucucguuuuccugccaaauaaacaggaucagcgcuuuacagaucuaaaaaaaaaaaaaaaaaaaaaaaaaaaaaaaaaaaaaaaaaaaaaaaaaaaaaaaaaaaaaaaaugcaucccccccccccccccccccccccccccccccaaaggcucuuuucagagccaccagaauu

SEQ ID NO: 20763 - RNA, 1037 nt, Artificial Sequence
  mRNA product Design e-2 comprising derived and/or modified sequence from HRSV(Memphis-37)__AIY60637.1__P (opt4)
gggagacccgugacccggaaguuguacggcuacgcgacuuucccucccacaaacccucgcgcccuuccuuuccuacuugggcccggcagaaagcuuaccauggagaaguucgcccccgaguuccacggcgaggacgccaacaacagagccaccaaguuccuggagagcaucaagggcaaguucaccagccccaaggaccccaagaagaaggacagcaucaucagcgugaacagcaucgacaucgaggugaccaaggagagccccaucaccagcaacagcaccaucaucaaccccaccaacgagaccgacgacaccgccggcaacaagcccaacuaccagagaaagccccuggugagcuucaaggaggaccccacccccagcgacaaccccuucagcaagcuguacaaggagaccaucgagaccuucgacaacaacgaggaggagagcagcuacagcuacgaggagaucaacgaccagaccaacgacaacaucaccgccagacuggacagaaucgacgagaagcugagcgagauccugggcaugcugcacacccuggugguggccagcgccggccccaccagcgccagagacggcaucagagacgccauggugggccugagagaggagaugaucgagaagaucagaaccgaggcccugaugaccaacgacagacuggaggccauggccagacugagaaacgaggagagcgagaagauggccaaggacaccagcgacgaggugagccugaaccccaccagcgagaagcugaacaaccugcuggagggcaacgacagcgacaacgaccugagccuggaggacuucugaggacuaguguccaccugucccuccugggcugcuggauugucucguuuuccugccaaauaaacaggaucagcgcuuuacagaucuaaaaaaaaaaaaaaaaaaaaaaaaaaaaaaaaaaaaaaaaaaaaaaaaaaaaaaaaaaaaaaaaugcaucccccccccccccccccccccccccccccccaaaggcucuuuucagagccaccagaauu

SEQ ID NO: 20764 - RNA, 1037 nt, Artificial Sequence
  mRNA product Design e-2 comprising derived and/or modified sequence from HRSV(Memphis-37)__AIY60637.1__P (opt5)
gggagacccgugacccggaaguuguacggcuacgcgacuuucccucccacaaacccucgcgcccuuccuuuccuacuugggcccggcagaaagcuuaccauggagaaguucgcccccgaauuucacggcgaggacgcuaacaauagagccaccaaauuccuggaaagcaucaaggggaaauuuacauccccuaaggauccgaaaaagaaggacucuauuaucagcgugaacuccauugauaucgaggucacgaaagaaucucccauuaccagcaauuccacaaucaucaacccuaccaaugagacagacgauaccgcgggaaacaagcccaauuaccagcggaaaccucucguuucuuucaaggaggaccccacaccuagcgauaacccguuuuccaaacuguauaaggaaaccauugagacguucgacaauaacgaagaggagagcucuuacuccuaugaagagaucaaugaucaaaccaacgacaauauuacagcucgccuugauagaaucgacgaaaagcugagcgagauucucggcaugcugcauacccuugugguggccucugccgggcccacauccgcucgggauggaauccgcgacgccauggucggccugagagaagagaugauugagaaaauccggaccgaagcucucaugacgaacgaccgccuggaggccauggcgagacugcggaaugaagagagcgaaaagauggccaaagauacaucugacgaggugucccucaacccuaccagcgagaagcugaacaaucuucuggaagggaacgauuccgacaaugaucucucucuggaggacuuuugaggacuaguguccaccugucccuccugggcugcuggauugucucguuuuccugccaaauaaacaggaucagcgcuuuacagaucuaaaaaaaaaaaaaaaaaaaaaaaaaaaaaaaaaaaaaaaaaaaaaaaaaaaaaaaaaaaaaaaaugcaucccccccccccccccccccccccccccccccaaaggcucuuuucagagccaccagaauu

SEQ ID NO: 20765 - RNA, 1037 nt, Artificial Sequence
  mRNA product Design e-2 comprising derived and/or modified sequence from HRSV(Memphis-37)__AIY60637.1__P (opt6)
gggagacccgugacccggaaguuguacggcuacgcgacuuucccucccacaaacccucgcgcccuuccuuuccuacuugggcccggcagaaagcuuaccauggaaaaauucgcaccagaauuccacggagaagacgcaaacaacagagcaacaaaauuccuagaaucaauaaaaggaaaauucacaagcccaaaagaucccaaaaaaaaagacucaaucauaagcguaaacucaauagauauagaaguaacaaaagaaaguccaauaacaagcaacaguacaauaauaaacccaacaaaugaaacagacgauacagcaggcaacaaaccaaacuaccaaagaaaaccgcuaguaaguuucaaagaagacccaacaccaagcgauaacccauuuucaaaauuauacaaagaaacaauagaaacauucgacaacaacgaagaagaaagcucauacucauacgaagaaauaaacgaccaaacaaacgacaacauaacagcgagauuagacagaauagacgaaaaacuaucagaaauacuaggcauguuacacacauuaguaguagcaagcgcaggaccaacaucagcaagagacggaauccgagacgcaaugguaggacuaagagaagaaaugauagaaaaaauaagaacagaagcacuaaugacaaacgacagacuagaagccauggcaagacuaagaaacgaagaaucagaaaaaauggcaaaagacacaucagacgaaguaucacuaaacccaacaagcgaaaaacuaaacaaccuauuagaaggaaacgacagcgacaacgaccuaucacucgaagacuucuaaggacuaguguccaccugucccuccugggcugcuggauugucucguuuuccugccaaauaaacaggaucagcgcuuuacagaucuaaaaaaaaaaaaaaaaaaaaaaaaaaaaaaaaaaaaaaaaaaaaaaaaaaaaaaaaaaaaaaaaugcaucccccccccccccccccccccccccccccccaaaggcucuuuucagagccaccagaauu

SEQ ID NO: 20766 - RNA, 1037 nt, Artificial Sequence
  mRNA product Design e-2 comprising derived and/or modified sequence from HRSV(Memphis-37)__AIY60637.1__P (opt11)
gggagacccgugacccggaaguuguacggcuacgcgacuuucccucccacaaacccucgcgcccuuccuuuccuacuugggcccggcagaaagcuuaccauggaaaaauucgccccagaauuucacggcgaagacgccaacaaccgagccaccaaauuccucgaaucaauaaaaggcaaauucacaucccccaaagaccccaaaaaaaaagacucgaucaucuccgugaacucaaucgacauagaagucaccaaagaaagccccaucaccuccaacagcaccaucaucaaccccacaaacgaaacagacgacaccgccggcaacaaaccaaacuaccaacgaaaaccccucgucagcuucaaagaagaccccacaccaagcgacaaccccuucuccaaacucuacaaagaaacaauagaaaccuucgacaacaacgaagaagaaagcucguacucauacgaagaaaucaacgaccaaaccaacgacaacaucaccgcccgccucgaccgcaucgacgaaaaacucuccgaaauccucggaaugcuccacacacucgucgucgccagcgccggccccaccucagcccgggacggcauccgcgacgccauggugggccuccgcgaggaaaugaucgaaaaaauccgcacagaagcccucaugaccaacgaccgccucgaagccauggcccgccuccgcaacgaagaauccgaaaaaauggccaaagacaccuccgacgaagucucacuaaaccccaccuccgaaaaacuaaacaaccuccuagaaggcaacgacagcgacaacgaccucucccuagaagacuucuaaggacuaguguccaccugucccuccugggcugcuggauugucucguuuuccugccaaauaaacaggaucagcgcuuuacagaucuaaaaaaaaaaaaaaaaaaaaaaaaaaaaaaaaaaaaaaaaaaaaaaaaaaaaaaaaaaaaaaaaugcaucccccccccccccccccccccccccccccccaaaggcucuuuucagagccaccagaauu

SEQ ID NO: 20767 - RNA, 1007 nt, Artificial Sequence
  mRNA product Design e-3 comprising derived and/or modified sequence from HRSV(Memphis-37)__AIY60637.1__P (wt)
gggagacuuucccauucuguagcagaauuugguguugccuguggucuuggucccgcggagaagcuuaccauggaaaaguuugcuccugaauuccauggagaagacgcaaacaacagagccacuaaauuccuagaaucaauaaagggcaaauucacaucaccuaaagaucccaagaaaaaagauaguaucauaucugucaacucaauagauauagaaguaaccaaagaaagcccuauaacuucaaauucaaccauuauaaacccuacaaaugagacagaugauacugcagggaacaagcccaauuaucaaagaaaaccacuagugaguuucaaagaagacccuacgccaagugauaaucccuuuucaaaacuauacaaagaaaccauagaaacauuugauaacaaugaagaagaaucuagcuauucauaugaagaaauaaaugaucagacaaacgauaauauaacagcaagauuagauaggauugaugaaaaauuaagugaaauacuaggaaugcuucacacacuaguaguagcaagugcaggaccuacaucugcucgggaugguauaagagaugccaugguugguuuaagagaagaaaugauagaaaaaaucagaacugaagcauugaugaccaaugauagauuagaagcuauggcaagacucaggaaugaggaaagugaaaagauggcaaaagacacaucagaugaagugucucucaauccaacaucagagaaauugaacaaccuguuggaaggaaaugauagugauaaugaucuaucacuugaagauuucugaggacuaguguccaccugucccuccugggcugcuggauugucucguuuuccugccaaauaaacaggaucagcgcuuuacagaucuaaaaaaaaaaaaaaaaaaaaaaaaaaaaaaaaaaaaaaaaaaaaaaaaaaaaaaaaaaaaaaaaugcaucccccccccccccccccccccccccccccccaaaggcucuuuucagagccaccagaauu

SEQ ID NO: 20768 - RNA, 1007 nt, Artificial Sequence
  mRNA product Design e-3 comprising derived and/or modified sequence from HRSV(Memphis-37)__AIY60637.1__P (opt1)
gggagacuuucccauucuguagcagaauuugguguugccuguggucuuggucccgcggagaagcuuaccauggagaaguucgcccccgaguuccacggcgaggacgccaacaaccgcgcgaccaaguuccuggagagcaucaaggggaaguucaccuccccgaaggaccccaagaagaaggacagcaucaucuccgugaacagcaucgacaucgaggucacgaaggagucccccaucaccagcaacuccaccaucaucaaccccaccaacgagacggacgacaccgccggcaacaagccgaacuaccagcggaagccccucgugagcuucaaggaggaccccacccccuccgacaacccguucagcaagcuguacaaggagaccaucgagacguucgacaacaacgaggaggaguccagcuacuccuacgaggagaucaacgaccagaccaacgacaacaucaccgcccgccuggaccggaucgacgagaagcucagcgagauccuggggaugcugcacacccucguggucgccuccgccggccccacgagcgcgcgcgacgggauccgggacgccauggugggccugcgcgaggagaugaucgagaagauccggaccgaggcccugaugaccaacgaccgccucgaggccauggcgcggcugcgcaacgaggaguccgagaagauggccaaggacaccagcgacgaggugucccugaaccccacgagcgagaagcucaacaaccugcuggagggcaacgacagcgacaacgaccucucccuggaggacuucugaggacuaguguccaccugucccuccugggcugcuggauugucucguuuuccugccaaauaaacaggaucagcgcuuuacagaucuaaaaaaaaaaaaaaaaaaaaaaaaaaaaaaaaaaaaaaaaaaaaaaaaaaaaaaaaaaaaaaaaugcaucccccccccccccccccccccccccccccccaaaggcucuuuucagagccaccagaauu

SEQ ID NO: 20769 - RNA, 1007 nt, Artificial Sequence
  mRNA product Design e-3 comprising derived and/or modified sequence from HRSV(Memphis-37)__AIY60637.1__P (opt2)
gggagacuuucccauucuguagcagaauuugguguugccuguggucuuggucccgcggagaagcuuaccauggagaaguucgcccccgaguuccacggcgaggacgccaacaaccgcgccaccaaguuccucgaguccaucaagggcaaguucaccucccccaaggaccccaagaagaaggacuccaucaucuccgucaacuccaucgacaucgaggucaccaaggagucccccaucaccuccaacuccaccaucaucaaccccaccaacgagaccgacgacaccgccggcaacaagcccaacuaccagcgcaagccccucgucuccuucaaggaggaccccacccccuccgacaaccccuucuccaagcucuacaaggagaccaucgagaccuucgacaacaacgaggaggaguccuccuacuccuacgaggagaucaacgaccagaccaacgacaacaucaccgcccgccucgaccgcaucgacgagaagcucuccgagauccucggcaugcuccacacccucgucgucgccuccgccggccccaccuccgcccgcgacggcauccgcgacgccauggucggccuccgcgaggagaugaucgagaagauccgcaccgaggcccucaugaccaacgaccgccucgaggccauggcccgccuccgcaacgaggaguccgagaagauggccaaggacaccuccgacgaggucucccucaaccccaccuccgagaagcucaacaaccuccucgagggcaacgacuccgacaacgaccucucccucgaggacuucugaggacuaguguccaccugucccuccugggcugcuggauugucucguuuuccugccaaauaaacaggaucagcgcuuuacagaucuaaaaaaaaaaaaaaaaaaaaaaaaaaaaaaaaaaaaaaaaaaaaaaaaaaaaaaaaaaaaaaaaugcaucccccccccccccccccccccccccccccccaaaggcucuuuucagagccaccagaauu

SEQ ID NO: 20770 - RNA, 1007 nt, Artificial Sequence
  mRNA product Design e-3 comprising derived and/or modified sequence from HRSV(Memphis-37)__AIY60637.1__P (opt3)
gggagacuuucccauucuguagcagaauuugguguugccuguggucuuggucccgcggagaagcuuaccauggagaaguucgcccccgaauuucacggcgaggacgcuaacaauagagcaaccaaauuccuggaaagcaucaaggggaaauuuacauccccuaaggauccgaaaaagaaggacucuauuauaucagugaacaguaucgauauugaggucacuaaagaaagcccaaucacguccaauucuaccauuaucaaccccacaaaugagacugacgauaccgccggaaacaagccuaauuaccagaggaaaccacucguuucguucaaggaggaccccacaccuucagauaacccauuuagcaaacuuuauaaggaaaccauagagacuuucgacaauaacgaagaggagaguuccuacucuuaugaagagaucaaugaucaaacaaacgacaauauuaccgcgcggcuggaucgcaucgacgaaaaguugagcgagauuuuagguaugcugcauacgcuagugguagcuuccgccggccccacuucagcacgagaugggauccgugacgccauggugggacucagagaagagaugauagagaaaauuaggaccgaagcucugaugacaaacgaccggcuugaggcaauggcccgccugagaaaugaagagagugaaaagauggcuaaagauacuagcgacgaggucucuuugaacccuaccuccgagaagcucaacaaucugcuggaaggcaacgauucagacaaugaucucagcuuagaggacuuuugaggacuaguguccaccugucccuccugggcugcuggauugucucguuuuccugccaaauaaacaggaucagcgcuuuacagaucuaaaaaaaaaaaaaaaaaaaaaaaaaaaaaaaaaaaaaaaaaaaaaaaaaaaaaaaaaaaaaaaaugcaucccccccccccccccccccccccccccccccaaaggcucuuuucagagccaccagaauu

SEQ ID NO: 20771 - RNA, 1007 nt, Artificial Sequence
  mRNA product Design e-3 comprising derived and/or modified sequence from HRSV(Memphis-37)__AIY60637.1__P (opt4)
gggagacuuucccauucuguagcagaauuugguguugccuguggucuuggucccgcggagaagcuuaccauggagaaguucgcccccgaguuccacggcgaggacgccaacaacagagccaccaaguuccuggagagcaucaagggcaaguucaccagccccaaggaccccaagaagaaggacagcaucaucagcgugaacagcaucgacaucgaggugaccaaggagagccccaucaccagcaacagcaccaucaucaaccccaccaacgagaccgacgacaccgccggcaacaagcccaacuaccagagaaagccccuggugagcuucaaggaggaccccacccccagcgacaaccccuucagcaagcuguacaaggagaccaucgagaccuucgacaacaacgaggaggagagcagcuacagcuacgaggagaucaacgaccagaccaacgacaacaucaccgccagacuggacagaaucgacgagaagcugagcgagauccugggcaugcugcacacccuggugguggccagcgccggccccaccagcgccagagacggcaucagagacgccauggugggccugagagaggagaugaucgagaagaucagaaccgaggcccugaugaccaacgacagacuggaggccauggccagacugagaaacgaggagagcgagaagauggccaaggacaccagcgacgaggugagccugaaccccaccagcgagaagcugaacaaccugcuggagggcaacgacagcgacaacgaccugagccuggaggacuucugaggacuaguguccaccugucccuccugggcugcuggauugucucguuuuccugccaaauaaacaggaucagcgcuuuacagaucuaaaaaaaaaaaaaaaaaaaaaaaaaaaaaaaaaaaaaaaaaaaaaaaaaaaaaaaaaaaaaaaaugcaucccccccccccccccccccccccccccccccaaaggcucuuuucagagccaccagaauu

SEQ ID NO: 20772 - RNA, 1007 nt, Artificial Sequence
  mRNA product Design e-3 comprising derived and/or modified sequence from HRSV(Memphis-37)__AIY60637.1__P (opt5)
gggagacuuucccauucuguagcagaauuugguguugccuguggucuuggucccgcggagaagcuuaccauggagaaguucgcccccgaauuucacggcgaggacgcuaacaauagagccaccaaauuccuggaaagcaucaaggggaaauuuacauccccuaaggauccgaaaaagaaggacucuauuaucagcgugaacuccauugauaucgaggucacgaaagaaucucccauuaccagcaauuccacaaucaucaacccuaccaaugagacagacgauaccgcgggaaacaagcccaauuaccagcggaaaccucucguuucuuucaaggaggaccccacaccuagcgauaacccguuuuccaaacuguauaaggaaaccauugagacguucgacaauaacgaagaggagagcucuuacuccuaugaagagaucaaugaucaaaccaacgacaauauuacagcucgccuugauagaaucgacgaaaagcugagcgagauucucggcaugcugcauacccuugugguggccucugccgggcccacauccgcucgggauggaauccgcgacgccauggucggccugagagaagagaugauugagaaaauccggaccgaagcucucaugacgaacgaccgccuggaggccauggcgagacugcggaaugaagagagcgaaaagauggccaaagauacaucugacgaggugucccucaacccuaccagcgagaagcugaacaaucuucuggaagggaacgauuccgacaaugaucucucucuggaggacuuuugaggacuaguguccaccugucccuccugggcugcuggauugucucguuuuccugccaaauaaacaggaucagcgcuuuacagaucuaaaaaaaaaaaaaaaaaaaaaaaaaaaaaaaaaaaaaaaaaaaaaaaaaaaaaaaaaaaaaaaaugcaucccccccccccccccccccccccccccccccaaaggcucuuuucagagccaccagaauu

SEQ ID NO: 20773 - RNA, 1007 nt, Artificial Sequence
  mRNA product Design e-3 comprising derived and/or modified sequence from HRSV(Memphis-37)__AIY60637.1__P (opt6)
gggagacuuucccauucuguagcagaauuugguguugccuguggucuuggucccgcggagaagcuuaccauggaaaaauucgcaccagaauuccacggagaagacgcaaacaacagagcaacaaaauuccuagaaucaauaaaaggaaaauucacaagcccaaaagaucccaaaaaaaaagacucaaucauaagcguaaacucaauagauauagaaguaacaaaagaaaguccaauaacaagcaacaguacaauaauaaacccaacaaaugaaacagacgauacagcaggcaacaaaccaaacuaccaaagaaaaccgcuaguaaguuucaaagaagacccaacaccaagcgauaacccauuuucaaaauuauacaaagaaacaauagaaacauucgacaacaacgaagaagaaagcucauacucauacgaagaaauaaacgaccaaacaaacgacaacauaacagcgagauuagacagaauagacgaaaaacuaucagaaauacuaggcauguuacacacauuaguaguagcaagcgcaggaccaacaucagcaagagacggaauccgagacgcaaugguaggacuaagagaagaaaugauagaaaaaauaagaacagaagcacuaaugacaaacgacagacuagaagccauggcaagacuaagaaacgaagaaucagaaaaaauggcaaaagacacaucagacgaaguaucacuaaacccaacaagcgaaaaacuaaacaaccuauuagaaggaaacgacagcgacaacgaccuaucacucgaagacuucuaaggacuaguguccaccugucccuccugggcugcuggauugucucguuuuccugccaaauaaacaggaucagcgcuuuacagaucuaaaaaaaaaaaaaaaaaaaaaaaaaaaaaaaaaaaaaaaaaaaaaaaaaaaaaaaaaaaaaaaaugcaucccccccccccccccccccccccccccccccaaaggcucuuuucagagccaccagaauu

SEQ ID NO: 20774 - RNA, 1007 nt, Artificial Sequence
  mRNA product Design e-3 comprising derived and/or modified sequence from HRSV(Memphis-37)__AIY60637.1__P (opt11)
gggagacuuucccauucuguagcagaauuugguguugccuguggucuuggucccgcggagaagcuuaccauggaaaaauucgccccagaauuucacggcgaagacgccaacaaccgagccaccaaauuccucgaaucaauaaaaggcaaauucacaucccccaaagaccccaaaaaaaaagacucgaucaucuccgugaacucaaucgacauagaagucaccaaagaaagccccaucaccuccaacagcaccaucaucaaccccacaaacgaaacagacgacaccgccggcaacaaaccaaacuaccaacgaaaaccccucgucagcuucaaagaagaccccacaccaagcgacaaccccuucuccaaacucuacaaagaaacaauagaaaccuucgacaacaacgaagaagaaagcucguacucauacgaagaaaucaacgaccaaaccaacgacaacaucaccgcccgccucgaccgcaucgacgaaaaacucuccgaaauccucggaaugcuccacacacucgucgucgccagcgccggccccaccucagcccgggacggcauccgcgacgccauggugggccuccgcgaggaaaugaucgaaaaaauccgcacagaagcccucaugaccaacgaccgccucgaagccauggcccgccuccgcaacgaagaauccgaaaaaauggccaaagacaccuccgacgaagucucacuaaaccccaccuccgaaaaacuaaacaaccuccuagaaggcaacgacagcgacaacgaccucucccuagaagacuucuaaggacuaguguccaccugucccuccugggcugcuggauugucucguuuuccugccaaauaaacaggaucagcgcuuuacagaucuaaaaaaaaaaaaaaaaaaaaaaaaaaaaaaaaaaaaaaaaaaaaaaaaaaaaaaaaaaaaaaaaugcaucccccccccccccccccccccccccccccccaaaggcucuuuucagagccaccagaauu

SEQ ID NO: 20775 - RNA, 1061 nt, Artificial Sequence
  mRNA product Design e-4 comprising derived and/or modified sequence from HRSV(Memphis-37)__AIY60637.1__P (wt)
gggagacuccugucgggcggaaguaggaggaguagaguuuaaaaacaguacucuuuuuccgguucgggacguaguugaagcaacgacaagccggauaaccgcucuugagacaggaagcuuaccauggaaaaguuugcuccugaauuccauggagaagacgcaaacaacagagccacuaaauuccuagaaucaauaaagggcaaauucacaucaccuaaagaucccaagaaaaaagauaguaucauaucugucaacucaauagauauagaaguaaccaaagaaagcccuauaacuucaaauucaaccauuauaaacccuacaaaugagacagaugauacugcagggaacaagcccaauuaucaaagaaaaccacuagugaguuucaaagaagacccuacgccaagugauaaucccuuuucaaaacuauacaaagaaaccauagaaacauuugauaacaaugaagaagaaucuagcuauucauaugaagaaauaaaugaucagacaaacgauaauauaacagcaagauuagauaggauugaugaaaaauuaagugaaauacuaggaaugcuucacacacuaguaguagcaagugcaggaccuacaucugcucgggaugguauaagagaugccaugguugguuuaagagaagaaaugauagaaaaaaucagaacugaagcauugaugaccaaugauagauuagaagcuauggcaagacucaggaaugaggaaagugaaaagauggcaaaagacacaucagaugaagugucucucaauccaacaucagagaaauugaacaaccuguuggaaggaaaugauagugauaaugaucuaucacuugaagauuucugaggacuaguguccaccugucccuccugggcugcuggauugucucguuuuccugccaaauaaacaggaucagcgcuuuacagaucuaaaaaaaaaaaaaaaaaaaaaaaaaaaaaaaaaaaaaaaaaaaaaaaaaaaaaaaaaaaaaaaaugcaucccccccccccccccccccccccccccccccaaaggcucuuuucagagccaccagaauu

SEQ ID NO: 20776 - RNA, 1061 nt, Artificial Sequence
  mRNA product Design e-4 comprising derived and/or modified sequence from HRSV(Memphis-37)__AIY60637.1__P (opt1)
gggagacuccugucgggcggaaguaggaggaguagaguuuaaaaacaguacucuuuuuccgguucgggacguaguugaagcaacgacaagccggauaaccgcucuugagacaggaagcuuaccauggagaaguucgcccccgaguuccacggcgaggacgccaacaaccgcgcgaccaaguuccuggagagcaucaaggggaaguucaccuccccgaaggaccccaagaagaaggacagcaucaucuccgugaacagcaucgacaucgaggucacgaaggagucccccaucaccagcaacuccaccaucaucaaccccaccaacgagacggacgacaccgccggcaacaagccgaacuaccagcggaagccccucgugagcuucaaggaggaccccacccccuccgacaacccguucagcaagcuguacaaggagaccaucgagacguucgacaacaacgaggaggaguccagcuacuccuacgaggagaucaacgaccagaccaacgacaacaucaccgcccgccuggaccggaucgacgagaagcucagcgagauccuggggaugcugcacacccucguggucgccuccgccggccccacgagcgcgcgcgacgggauccgggacgccauggugggccugcgcgaggagaugaucgagaagauccggaccgaggcccugaugaccaacgaccgccucgaggccauggcgcggcugcgcaacgaggaguccgagaagauggccaaggacaccagcgacgaggugucccugaaccccacgagcgagaagcucaacaaccugcuggagggcaacgacagcgacaacgaccucucccuggaggacuucugaggacuaguguccaccugucccuccugggcugcuggauugucucguuuuccugccaaauaaacaggaucagcgcuuuacagaucuaaaaaaaaaaaaaaaaaaaaaaaaaaaaaaaaaaaaaaaaaaaaaaaaaaaaaaaaaaaaaaaaugcaucccccccccccccccccccccccccccccccaaaggcucuuuucagagccaccagaauu

SEQ ID NO: 20777 - RNA, 1061 nt, Artificial Sequence
  mRNA product Design e-4 comprising derived and/or modified sequence from HRSV(Memphis-37)__AIY60637.1__P (opt2)
gggagacuccugucgggcggaaguaggaggaguagaguuuaaaaacaguacucuuuuuccgguucgggacguaguugaagcaacgacaagccggauaaccgcucuugagacaggaagcuuaccauggagaaguucgcccccgaguuccacggcgaggacgccaacaaccgcgccaccaaguuccucgaguccaucaagggcaaguucaccucccccaaggaccccaagaagaaggacuccaucaucuccgucaacuccaucgacaucgaggucaccaaggagucccccaucaccuccaacuccaccaucaucaaccccaccaacgagaccgacgacaccgccggcaacaagcccaacuaccagcgcaagccccucgucuccuucaaggaggaccccacccccuccgacaaccccuucuccaagcucuacaaggagaccaucgagaccuucgacaacaacgaggaggaguccuccuacuccuacgaggagaucaacgaccagaccaacgacaacaucaccgcccgccucgaccgcaucgacgagaagcucuccgagauccucggcaugcuccacacccucgucgucgccuccgccggccccaccuccgcccgcgacggcauccgcgacgccauggucggccuccgcgaggagaugaucgagaagauccgcaccgaggcccucaugaccaacgaccgccucgaggccauggcccgccuccgcaacgaggaguccgagaagauggccaaggacaccuccgacgaggucucccucaaccccaccuccgagaagcucaacaaccuccucgagggcaacgacuccgacaacgaccucucccucgaggacuucugaggacuaguguccaccugucccuccugggcugcuggauugucucguuuuccugccaaauaaacaggaucagcgcuuuacagaucuaaaaaaaaaaaaaaaaaaaaaaaaaaaaaaaaaaaaaaaaaaaaaaaaaaaaaaaaaaaaaaaaugcaucccccccccccccccccccccccccccccccaaaggcucuuuucagagccaccagaauu

SEQ ID NO: 20778 - RNA, 1061 nt, Artificial Sequence
  mRNA product Design e-4 comprising derived and/or modified sequence from HRSV(Memphis-37)__AIY60637.1__P (opt3)
gggagacuccugucgggcggaaguaggaggaguagaguuuaaaaacaguacucuuuuuccgguucgggacguaguugaagcaacgacaagccggauaaccgcucuugagacaggaagcuuaccauggagaaguucgcccccgaauuucacggcgaggacgcuaacaauagagcaaccaaauuccuggaaagcaucaaggggaaauuuacauccccuaaggauccgaaaaagaaggacucuauuauaucagugaacaguaucgauauugaggucacuaaagaaagcccaaucacguccaauucuaccauuaucaaccccacaaaugagacugacgauaccgccggaaacaagccuaauuaccagaggaaaccacucguuucguucaaggaggaccccacaccuucagauaacccauuuagcaaacuuuauaaggaaaccauagagacuuucgacaauaacgaagaggagaguuccuacucuuaugaagagaucaaugaucaaacaaacgacaauauuaccgcgcggcuggaucgcaucgacgaaaaguugagcgagauuuuagguaugcugcauacgcuagugguagcuuccgccggccccacuucagcacgagaugggauccgugacgccauggugggacucagagaagagaugauagagaaaauuaggaccgaagcucugaugacaaacgaccggcuugaggcaauggcccgccugagaaaugaagagagugaaaagauggcuaaagauacuagcgacgaggucucuuugaacccuaccuccgagaagcucaacaaucugcuggaaggcaacgauucagacaaugaucucagcuuagaggacuuuugaggacuaguguccaccugucccuccugggcugcuggauugucucguuuuccugccaaauaaacaggaucagcgcuuuacagaucuaaaaaaaaaaaaaaaaaaaaaaaaaaaaaaaaaaaaaaaaaaaaaaaaaaaaaaaaaaaaaaaaugcaucccccccccccccccccccccccccccccccaaaggcucuuuucagagccaccagaauu

SEQ ID NO: 20779 - RNA, 1061 nt, Artificial Sequence
  mRNA product Design e-4 comprising derived and/or modified sequence from HRSV(Memphis-37)__AIY60637.1__P (opt4)
gggagacuccugucgggcggaaguaggaggaguagaguuuaaaaacaguacucuuuuuccgguucgggacguaguugaagcaacgacaagccggauaaccgcucuugagacaggaagcuuaccauggagaaguucgcccccgaguuccacggcgaggacgccaacaacagagccaccaaguuccuggagagcaucaagggcaaguucaccagccccaaggaccccaagaagaaggacagcaucaucagcgugaacagcaucgacaucgaggugaccaaggagagccccaucaccagcaacagcaccaucaucaaccccaccaacgagaccgacgacaccgccggcaacaagcccaacuaccagagaaagccccuggugagcuucaaggaggaccccacccccagcgacaaccccuucagcaagcuguacaaggagaccaucgagaccuucgacaacaacgaggaggagagcagcuacagcuacgaggagaucaacgaccagaccaacgacaacaucaccgccagacuggacagaaucgacgagaagcugagcgagauccugggcaugcugcacacccuggugguggccagcgccggccccaccagcgccagagacggcaucagagacgccauggugggccugagagaggagaugaucgagaagaucagaaccgaggcccugaugaccaacgacagacuggaggccauggccagacugagaaacgaggagagcgagaagauggccaaggacaccagcgacgaggugagccugaaccccaccagcgagaagcugaacaaccugcuggagggcaacgacagcgacaacgaccugagccuggaggacuucugaggacuaguguccaccugucccuccugggcugcuggauugucucguuuuccugccaaauaaacaggaucagcgcuuuacagaucuaaaaaaaaaaaaaaaaaaaaaaaaaaaaaaaaaaaaaaaaaaaaaaaaaaaaaaaaaaaaaaaaugcaucccccccccccccccccccccccccccccccaaaggcucuuuucagagccaccagaauu

SEQ ID NO: 20780 - RNA, 1061 nt, Artificial Sequence
  mRNA product Design e-4 comprising derived and/or modified sequence from HRSV(Memphis-37)__AIY60637.1__P (opt5)
gggagacuccugucgggcggaaguaggaggaguagaguuuaaaaacaguacucuuuuuccgguucgggacguaguugaagcaacgacaagccggauaaccgcucuugagacaggaagcuuaccauggagaaguucgcccccgaauuucacggcgaggacgcuaacaauagagccaccaaauuccuggaaagcaucaaggggaaauuuacauccccuaaggauccgaaaaagaaggacucuauuaucagcgugaacuccauugauaucgaggucacgaaagaaucucccauuaccagcaauuccacaaucaucaacccuaccaaugagacagacgauaccgcgggaaacaagcccaauuaccagcggaaaccucucguuucuuucaaggaggaccccacaccuagcgauaacccguuuuccaaacuguauaaggaaaccauugagacguucgacaauaacgaagaggagagcucuuacuccuaugaagagaucaaugaucaaaccaacgacaauauuacagcucgccuugauagaaucgacgaaaagcugagcgagauucucggcaugcugcauacccuugugguggccucugccgggcccacauccgcucgggauggaauccgcgacgccauggucggccugagagaagagaugauugagaaaauccggaccgaagcucucaugacgaacgaccgccuggaggccauggcgagacugcggaaugaagagagcgaaaagauggccaaagauacaucugacgaggugucccucaacccuaccagcgagaagcugaacaaucuucuggaagggaacgauuccgacaaugaucucucucuggaggacuuuugaggacuaguguccaccugucccuccugggcugcuggauugucucguuuuccugccaaauaaacaggaucagcgcuuuacagaucuaaaaaaaaaaaaaaaaaaaaaaaaaaaaaaaaaaaaaaaaaaaaaaaaaaaaaaaaaaaaaaaaugcaucccccccccccccccccccccccccccccccaaaggcucuuuucagagccaccagaauu

SEQ ID NO: 20781 - RNA, 1061 nt, Artificial Sequence
  mRNA product Design e-4 comprising derived and/or modified sequence from HRSV(Memphis-37)__AIY60637.1__P (opt6)
gggagacuccugucgggcggaaguaggaggaguagaguuuaaaaacaguacucuuuuuccgguucgggacguaguugaagcaacgacaagccggauaaccgcucuugagacaggaagcuuaccauggaaaaauucgcaccagaauuccacggagaagacgcaaacaacagagcaacaaaauuccuagaaucaauaaaaggaaaauucacaagcccaaaagaucccaaaaaaaaagacucaaucauaagcguaaacucaauagauauagaaguaacaaaagaaaguccaauaacaagcaacaguacaauaauaaacccaacaaaugaaacagacgauacagcaggcaacaaaccaaacuaccaaagaaaaccgcuaguaaguuucaaagaagacccaacaccaagcgauaacccauuuucaaaauuauacaaagaaacaauagaaacauucgacaacaacgaagaagaaagcucauacucauacgaagaaauaaacgaccaaacaaacgacaacauaacagcgagauuagacagaauagacgaaaaacuaucagaaauacuaggcauguuacacacauuaguaguagcaagcgcaggaccaacaucagcaagagacggaauccgagacgcaaugguaggacuaagagaagaaaugauagaaaaaauaagaacagaagcacuaaugacaaacgacagacuagaagccauggcaagacuaagaaacgaagaaucagaaaaaauggcaaaagacacaucagacgaaguaucacuaaacccaacaagcgaaaaacuaaacaaccuauuagaaggaaacgacagcgacaacgaccuaucacucgaagacuucuaaggacuaguguccaccugucccuccugggcugcuggauugucucguuuuccugccaaauaaacaggaucagcgcuuuacagaucuaaaaaaaaaaaaaaaaaaaaaaaaaaaaaaaaaaaaaaaaaaaaaaaaaaaaaaaaaaaaaaaaugcaucccccccccccccccccccccccccccccccaaaggcucuuuucagagccaccagaauu

SEQ ID NO: 20782 - RNA, 1061 nt, Artificial Sequence
  mRNA product Design e-4 comprising derived and/or modified sequence from HRSV(Memphis-37)__AIY60637.1__P (opt11)
gggagacuccugucgggcggaaguaggaggaguagaguuuaaaaacaguacucuuuuuccgguucgggacguaguugaagcaacgacaagccggauaaccgcucuugagacaggaagcuuaccauggaaaaauucgccccagaauuucacggcgaagacgccaacaaccgagccaccaaauuccucgaaucaauaaaaggcaaauucacaucccccaaagaccccaaaaaaaaagacucgaucaucuccgugaacucaaucgacauagaagucaccaaagaaagccccaucaccuccaacagcaccaucaucaaccccacaaacgaaacagacgacaccgccggcaacaaaccaaacuaccaacgaaaaccccucgucagcuucaaagaagaccccacaccaagcgacaaccccuucuccaaacucuacaaagaaacaauagaaaccuucgacaacaacgaagaagaaagcucguacucauacgaagaaaucaacgaccaaaccaacgacaacaucaccgcccgccucgaccgcaucgacgaaaaacucuccgaaauccucggaaugcuccacacacucgucgucgccagcgccggccccaccucagcccgggacggcauccgcgacgccauggugggccuccgcgaggaaaugaucgaaaaaauccgcacagaagcccucaugaccaacgaccgccucgaagccauggcccgccuccgcaacgaagaauccgaaaaaauggccaaagacaccuccgacgaagucucacuaaaccccaccuccgaaaaacuaaacaaccuccuagaaggcaacgacagcgacaacgaccucucccuagaagacuucuaaggacuaguguccaccugucccuccugggcugcuggauugucucguuuuccugccaaauaaacaggaucagcgcuuuacagaucuaaaaaaaaaaaaaaaaaaaaaaaaaaaaaaaaaaaaaaaaaaaaaaaaaaaaaaaaaaaaaaaaugcaucccccccccccccccccccccccccccccccaaaggcucuuuucagagccaccagaauu

SEQ ID NO: 20783 - RNA, 1028 nt, Artificial Sequence
  mRNA product Design e-5 comprising derived and/or modified sequence from HRSV(Memphis-37)__AIY60637.1__P (wt)
gggagagcggcucggccauuuugucccagucaguccggaggcugcggcugcagaaguaccgccugcggaguaacugcaaagaagcuuaccauggaaaaguuugcuccugaauuccauggagaagacgcaaacaacagagccacuaaauuccuagaaucaauaaagggcaaauucacaucaccuaaagaucccaagaaaaaagauaguaucauaucugucaacucaauagauauagaaguaaccaaagaaagcccuauaacuucaaauucaaccauuauaaacccuacaaaugagacagaugauacugcagggaacaagcccaauuaucaaagaaaaccacuagugaguuucaaagaagacccuacgccaagugauaaucccuuuucaaaacuauacaaagaaaccauagaaacauuugauaacaaugaagaagaaucuagcuauucauaugaagaaauaaaugaucagacaaacgauaauauaacagcaagauuagauaggauugaugaaaaauuaagugaaauacuaggaaugcuucacacacuaguaguagcaagugcaggaccuacaucugcucgggaugguauaagagaugccaugguugguuuaagagaagaaaugauagaaaaaaucagaacugaagcauugaugaccaaugauagauuagaagcuauggcaagacucaggaaugaggaaagugaaaagauggcaaaagacacaucagaugaagugucucucaauccaacaucagagaaauugaacaaccuguuggaaggaaaugauagugauaaugaucuaucacuugaagauuucugaggacuaguguccaccugucccuccugggcugcuggauugucucguuuuccugccaaauaaacaggaucagcgcuuuacagaucuaaaaaaaaaaaaaaaaaaaaaaaaaaaaaaaaaaaaaaaaaaaaaaaaaaaaaaaaaaaaaaaaugcaucccccccccccccccccccccccccccccccaaaggcucuuuucagagccaccagaauu

SEQ ID NO: 20784 - RNA, 1028 nt, Artificial Sequence
  mRNA product Design e-5 comprising derived and/or modified sequence from HRSV(Memphis-37)__AIY60637.1__P (opt1)
gggagagcggcucggccauuuugucccagucaguccggaggcugcggcugcagaaguaccgccugcggaguaacugcaaagaagcuuaccauggagaaguucgcccccgaguuccacggcgaggacgccaacaaccgcgcgaccaaguuccuggagagcaucaaggggaaguucaccuccccgaaggaccccaagaagaaggacagcaucaucuccgugaacagcaucgacaucgaggucacgaaggagucccccaucaccagcaacuccaccaucaucaaccccaccaacgagacggacgacaccgccggcaacaagccgaacuaccagcggaagccccucgugagcuucaaggaggaccccacccccuccgacaacccguucagcaagcuguacaaggagaccaucgagacguucgacaacaacgaggaggaguccagcuacuccuacgaggagaucaacgaccagaccaacgacaacaucaccgcccgccuggaccggaucgacgagaagcucagcgagauccuggggaugcugcacacccucguggucgccuccgccggccccacgagcgcgcgcgacgggauccgggacgccauggugggccugcgcgaggagaugaucgagaagauccggaccgaggcccugaugaccaacgaccgccucgaggccauggcgcggcugcgcaacgaggaguccgagaagauggccaaggacaccagcgacgaggugucccugaaccccacgagcgagaagcucaacaaccugcuggagggcaacgacagcgacaacgaccucucccuggaggacuucugaggacuaguguccaccugucccuccugggcugcuggauugucucguuuuccugccaaauaaacaggaucagcgcuuuacagaucuaaaaaaaaaaaaaaaaaaaaaaaaaaaaaaaaaaaaaaaaaaaaaaaaaaaaaaaaaaaaaaaaugcaucccccccccccccccccccccccccccccccaaaggcucuuuucagagccaccagaauu

SEQ ID NO: 20785 - RNA, 1028 nt, Artificial Sequence
  mRNA product Design e-5 comprising derived and/or modified sequence from HRSV(Memphis-37)__AIY60637.1__P (opt2)
gggagagcggcucggccauuuugucccagucaguccggaggcugcggcugcagaaguaccgccugcggaguaacugcaaagaagcuuaccauggagaaguucgcccccgaguuccacggcgaggacgccaacaaccgcgccaccaaguuccucgaguccaucaagggcaaguucaccucccccaaggaccccaagaagaaggacuccaucaucuccgucaacuccaucgacaucgaggucaccaaggagucccccaucaccuccaacuccaccaucaucaaccccaccaacgagaccgacgacaccgccggcaacaagcccaacuaccagcgcaagccccucgucuccuucaaggaggaccccacccccuccgacaaccccuucuccaagcucuacaaggagaccaucgagaccuucgacaacaacgaggaggaguccuccuacuccuacgaggagaucaacgaccagaccaacgacaacaucaccgcccgccucgaccgcaucgacgagaagcucuccgagauccucggcaugcuccacacccucgucgucgccuccgccggccccaccuccgcccgcgacggcauccgcgacgccauggucggccuccgcgaggagaugaucgagaagauccgcaccgaggcccucaugaccaacgaccgccucgaggccauggcccgccuccgcaacgaggaguccgagaagauggccaaggacaccuccgacgaggucucccucaaccccaccuccgagaagcucaacaaccuccucgagggcaacgacuccgacaacgaccucucccucgaggacuucugaggacuaguguccaccugucccuccugggcugcuggauugucucguuuuccugccaaauaaacaggaucagcgcuuuacagaucuaaaaaaaaaaaaaaaaaaaaaaaaaaaaaaaaaaaaaaaaaaaaaaaaaaaaaaaaaaaaaaaaugcaucccccccccccccccccccccccccccccccaaaggcucuuuucagagccaccagaauu

SEQ ID NO: 20786 - RNA, 1028 nt, Artificial Sequence
  mRNA product Design e-5 comprising derived and/or modified sequence from HRSV(Memphis-37)__AIY60637.1__P (opt3)
gggagagcggcucggccauuuugucccagucaguccggaggcugcggcugcagaaguaccgccugcggaguaacugcaaagaagcuuaccauggagaaguucgcccccgaauuucacggcgaggacgcuaacaauagagcaaccaaauuccuggaaagcaucaaggggaaauuuacauccccuaaggauccgaaaaagaaggacucuauuauaucagugaacaguaucgauauugaggucacuaaagaaagcccaaucacguccaauucuaccauuaucaaccccacaaaugagacugacgauaccgccggaaacaagccuaauuaccagaggaaaccacucguuucguucaaggaggaccccacaccuucagauaacccauuuagcaaacuuuauaaggaaaccauagagacuuucgacaauaacgaagaggagaguuccuacucuuaugaagagaucaaugaucaaacaaacgacaauauuaccgcgcggcuggaucgcaucgacgaaaaguugagcgagauuuuagguaugcugcauacgcuagugguagcuuccgccggccccacuucagcacgagaugggauccgugacgccauggugggacucagagaagagaugauagagaaaauuaggaccgaagcucugaugacaaacgaccggcuugaggcaauggcccgccugagaaaugaagagagugaaaagauggcuaaagauacuagcgacgaggucucuuugaacccuaccuccgagaagcucaacaaucugcuggaaggcaacgauucagacaaugaucucagcuuagaggacuuuugaggacuaguguccaccugucccuccugggcugcuggauugucucguuuuccugccaaauaaacaggaucagcgcuuuacagaucuaaaaaaaaaaaaaaaaaaaaaaaaaaaaaaaaaaaaaaaaaaaaaaaaaaaaaaaaaaaaaaaaugcaucccccccccccccccccccccccccccccccaaaggcucuuuucagagccaccagaauu

SEQ ID NO: 20787 - RNA, 1028 nt, Artificial Sequence
  mRNA product Design e-5 comprising derived and/or modified sequence from HRSV(Memphis-37)__AIY60637.1__P (opt4)
gggagagcggcucggccauuuugucccagucaguccggaggcugcggcugcagaaguaccgccugcggaguaacugcaaagaagcuuaccauggagaaguucgcccccgaguuccacggcgaggacgccaacaacagagccaccaaguuccuggagagcaucaagggcaaguucaccagccccaaggaccccaagaagaaggacagcaucaucagcgugaacagcaucgacaucgaggugaccaaggagagccccaucaccagcaacagcaccaucaucaaccccaccaacgagaccgacgacaccgccggcaacaagcccaacuaccagagaaagccccuggugagcuucaaggaggaccccacccccagcgacaaccccuucagcaagcuguacaaggagaccaucgagaccuucgacaacaacgaggaggagagcagcuacagcuacgaggagaucaacgaccagaccaacgacaacaucaccgccagacuggacagaaucgacgagaagcugagcgagauccugggcaugcugcacacccuggugguggccagcgccggccccaccagcgccagagacggcaucagagacgccauggugggccugagagaggagaugaucgagaagaucagaaccgaggcccugaugaccaacgacagacuggaggccauggccagacugagaaacgaggagagcgagaagauggccaaggacaccagcgacgaggugagccugaaccccaccagcgagaagcugaacaaccugcuggagggcaacgacagcgacaacgaccugagccuggaggacuucugaggacuaguguccaccugucccuccugggcugcuggauugucucguuuuccugccaaauaaacaggaucagcgcuuuacagaucuaaaaaaaaaaaaaaaaaaaaaaaaaaaaaaaaaaaaaaaaaaaaaaaaaaaaaaaaaaaaaaaaugcaucccccccccccccccccccccccccccccccaaaggcucuuuucagagccaccagaauu

SEQ ID NO: 20788 - RNA, 1028 nt, Artificial Sequence
  mRNA product Design e-5 comprising derived and/or modified sequence from HRSV(Memphis-37)__AIY60637.1__P (opt5)
gggagagcggcucggccauuuugucccagucaguccggaggcugcggcugcagaaguaccgccugcggaguaacugcaaagaagcuuaccauggagaaguucgcccccgaauuucacggcgaggacgcuaacaauagagccaccaaauuccuggaaagcaucaaggggaaauuuacauccccuaaggauccgaaaaagaaggacucuauuaucagcgugaacuccauugauaucgaggucacgaaagaaucucccauuaccagcaauuccacaaucaucaacccuaccaaugagacagacgauaccgcgggaaacaagcccaauuaccagcggaaaccucucguuucuuucaaggaggaccccacaccuagcgauaacccguuuuccaaacuguauaaggaaaccauugagacguucgacaauaacgaagaggagagcucuuacuccuaugaagagaucaaugaucaaaccaacgacaauauuacagcucgccuugauagaaucgacgaaaagcugagcgagauucucggcaugcugcauacccuugugguggccucugccgggcccacauccgcucgggauggaauccgcgacgccauggucggccugagagaagagaugauugagaaaauccggaccgaagcucucaugacgaacgaccgccuggaggccauggcgagacugcggaaugaagagagcgaaaagauggccaaagauacaucugacgaggugucccucaacccuaccagcgagaagcugaacaaucuucuggaagggaacgauuccgacaaugaucucucucuggaggacuuuugaggacuaguguccaccugucccuccugggcugcuggauugucucguuuuccugccaaauaaacaggaucagcgcuuuacagaucuaaaaaaaaaaaaaaaaaaaaaaaaaaaaaaaaaaaaaaaaaaaaaaaaaaaaaaaaaaaaaaaaugcaucccccccccccccccccccccccccccccccaaaggcucuuuucagagccaccagaauu

SEQ ID NO: 20789 - RNA, 1028 nt, Artificial Sequence
  mRNA product Design e-5 comprising derived and/or modified sequence from HRSV(Memphis-37)__AIY60637.1__P (opt6)
gggagagcggcucggccauuuugucccagucaguccggaggcugcggcugcagaaguaccgccugcggaguaacugcaaagaagcuuaccauggaaaaauucgcaccagaauuccacggagaagacgcaaacaacagagcaacaaaauuccuagaaucaauaaaaggaaaauucacaagcccaaaagaucccaaaaaaaaagacucaaucauaagcguaaacucaauagauauagaaguaacaaaagaaaguccaauaacaagcaacaguacaauaauaaacccaacaaaugaaacagacgauacagcaggcaacaaaccaaacuaccaaagaaaaccgcuaguaaguuucaaagaagacccaacaccaagcgauaacccauuuucaaaauuauacaaagaaacaauagaaacauucgacaacaacgaagaagaaagcucauacucauacgaagaaauaaacgaccaaacaaacgacaacauaacagcgagauuagacagaauagacgaaaaacuaucagaaauacuaggcauguuacacacauuaguaguagcaagcgcaggaccaacaucagcaagagacggaauccgagacgcaaugguaggacuaagagaagaaaugauagaaaaaauaagaacagaagcacuaaugacaaacgacagacuagaagccauggcaagacuaagaaacgaagaaucagaaaaaauggcaaaagacacaucagacgaaguaucacuaaacccaacaagcgaaaaacuaaacaaccuauuagaaggaaacgacagcgacaacgaccuaucacucgaagacuucuaaggacuaguguccaccugucccuccugggcugcuggauugucucguuuuccugccaaauaaacaggaucagcgcuuuacagaucuaaaaaaaaaaaaaaaaaaaaaaaaaaaaaaaaaaaaaaaaaaaaaaaaaaaaaaaaaaaaaaaaugcaucccccccccccccccccccccccccccccccaaaggcucuuuucagagccaccagaauu

SEQ ID NO: 20790 - RNA, 1028 nt, Artificial Sequence
  mRNA product Design e-5 comprising derived and/or modified sequence from HRSV(Memphis-37)__AIY60637.1__P (opt11)
gggagagcggcucggccauuuugucccagucaguccggaggcugcggcugcagaaguaccgccugcggaguaacugcaaagaagcuuaccauggaaaaauucgccccagaauuucacggcgaagacgccaacaaccgagccaccaaauuccucgaaucaauaaaaggcaaauucacaucccccaaagaccccaaaaaaaaagacucgaucaucuccgugaacucaaucgacauagaagucaccaaagaaagccccaucaccuccaacagcaccaucaucaaccccacaaacgaaacagacgacaccgccggcaacaaaccaaacuaccaacgaaaaccccucgucagcuucaaagaagaccccacaccaagcgacaaccccuucuccaaacucuacaaagaaacaauagaaaccuucgacaacaacgaagaagaaagcucguacucauacgaagaaaucaacgaccaaaccaacgacaacaucaccgcccgccucgaccgcaucgacgaaaaacucuccgaaauccucggaaugcuccacacacucgucgucgccagcgccggccccaccucagcccgggacggcauccgcgacgccauggugggccuccgcgaggaaaugaucgaaaaaauccgcacagaagcccucaugaccaacgaccgccucgaagccauggcccgccuccgcaacgaagaauccgaaaaaauggccaaagacaccuccgacgaagucucacuaaaccccaccuccgaaaaacuaaacaaccuccuagaaggcaacgacagcgacaacgaccucucccuagaagacuucuaaggacuaguguccaccugucccuccugggcugcuggauugucucguuuuccugccaaauaaacaggaucagcgcuuuacagaucuaaaaaaaaaaaaaaaaaaaaaaaaaaaaaaaaaaaaaaaaaaaaaaaaaaaaaaaaaaaaaaaaugcaucccccccccccccccccccccccccccccccaaaggcucuuuucagagccaccagaauu

SEQ ID NO: 20791 - RNA, 1095 nt, Artificial Sequence
  mRNA product Design e-6 comprising derived and/or modified sequence from HRSV(Memphis-37)__AIY60637.1__P (wt)
gggagagcggcucggccauuuugucccagucaguccggaggcugcggcugcagaaguaccgccugcggaguaacugcaaagaagcuuaccauggaaaaguuugcuccugaauuccauggagaagacgcaaacaacagagccacuaaauuccuagaaucaauaaagggcaaauucacaucaccuaaagaucccaagaaaaaagauaguaucauaucugucaacucaauagauauagaaguaaccaaagaaagcccuauaacuucaaauucaaccauuauaaacccuacaaaugagacagaugauacugcagggaacaagcccaauuaucaaagaaaaccacuagugaguuucaaagaagacccuacgccaagugauaaucccuuuucaaaacuauacaaagaaaccauagaaacauuugauaacaaugaagaagaaucuagcuauucauaugaagaaauaaaugaucagacaaacgauaauauaacagcaagauuagauaggauugaugaaaaauuaagugaaauacuaggaaugcuucacacacuaguaguagcaagugcaggaccuacaucugcucgggaugguauaagagaugccaugguugguuuaagagaagaaaugauagaaaaaaucagaacugaagcauugaugaccaaugauagauuagaagcuauggcaagacucaggaaugaggaaagugaaaagauggcaaaagacacaucagaugaagugucucucaauccaacaucagagaaauugaacaaccuguuggaaggaaaugauagugauaaugaucuaucacuugaagauuucugaggacuaguacuggcugcaucucccuuuccucuguccuccauccuucucccaggauggugaagggggaccugguacccagugauccccaccccaggauccuaaaucaugacuuaccugcuaauaaaaacucauuggaaaagugagaagaucuaaaaaaaaaaaaaaaaaaaaaaaaaaaaaaaaaaaaaaaaaaaaaaaaaaaaaaaaaaaaaaaaugcaucccccccccccccccccccccccccccccccaaaggcucuuuucagagccaccagaauu

SEQ ID NO: 20792 - RNA, 1095 nt, Artificial Sequence
  mRNA product Design e-6 comprising derived and/or modified sequence from HRSV(Memphis-37)__AIY60637.1__P (opt1)
gggagagcggcucggccauuuugucccagucaguccggaggcugcggcugcagaaguaccgccugcggaguaacugcaaagaagcuuaccauggagaaguucgcccccgaguuccacggcgaggacgccaacaaccgcgcgaccaaguuccuggagagcaucaaggggaaguucaccuccccgaaggaccccaagaagaaggacagcaucaucuccgugaacagcaucgacaucgaggucacgaaggagucccccaucaccagcaacuccaccaucaucaaccccaccaacgagacggacgacaccgccggcaacaagccgaacuaccagcggaagccccucgugagcuucaaggaggaccccacccccuccgacaacccguucagcaagcuguacaaggagaccaucgagacguucgacaacaacgaggaggaguccagcuacuccuacgaggagaucaacgaccagaccaacgacaacaucaccgcccgccuggaccggaucgacgagaagcucagcgagauccuggggaugcugcacacccucguggucgccuccgccggccccacgagcgcgcgcgacgggauccgggacgccauggugggccugcgcgaggagaugaucgagaagauccggaccgaggcccugaugaccaacgaccgccucgaggccauggcgcggcugcgcaacgaggaguccgagaagauggccaaggacaccagcgacgaggugucccugaaccccacgagcgagaagcucaacaaccugcuggagggcaacgacagcgacaacgaccucucccuggaggacuucugaggacuaguacuggcugcaucucccuuuccucuguccuccauccuucucccaggauggugaagggggaccugguacccagugauccccaccccaggauccuaaaucaugacuuaccugcuaauaaaaacucauuggaaaagugagaagaucuaaaaaaaaaaaaaaaaaaaaaaaaaaaaaaaaaaaaaaaaaaaaaaaaaaaaaaaaaaaaaaaaugcaucccccccccccccccccccccccccccccccaaaggcucuuuucagagccaccagaauu

SEQ ID NO: 20793 - RNA, 1095 nt, Artificial Sequence
  mRNA product Design e-6 comprising derived and/or modified sequence from HRSV(Memphis-37)__AIY60637.1__P (opt2)
gggagagcggcucggccauuuugucccagucaguccggaggcugcggcugcagaaguaccgccugcggaguaacugcaaagaagcuuaccauggagaaguucgcccccgaguuccacggcgaggacgccaacaaccgcgccaccaaguuccucgaguccaucaagggcaaguucaccucccccaaggaccccaagaagaaggacuccaucaucuccgucaacuccaucgacaucgaggucaccaaggagucccccaucaccuccaacuccaccaucaucaaccccaccaacgagaccgacgacaccgccggcaacaagcccaacuaccagcgcaagccccucgucuccuucaaggaggaccccacccccuccgacaaccccuucuccaagcucuacaaggagaccaucgagaccuucgacaacaacgaggaggaguccuccuacuccuacgaggagaucaacgaccagaccaacgacaacaucaccgcccgccucgaccgcaucgacgagaagcucuccgagauccucggcaugcuccacacccucgucgucgccuccgccggccccaccuccgcccgcgacggcauccgcgacgccauggucggccuccgcgaggagaugaucgagaagauccgcaccgaggcccucaugaccaacgaccgccucgaggccauggcccgccuccgcaacgaggaguccgagaagauggccaaggacaccuccgacgaggucucccucaaccccaccuccgagaagcucaacaaccuccucgagggcaacgacuccgacaacgaccucucccucgaggacuucugaggacuaguacuggcugcaucucccuuuccucuguccuccauccuucucccaggauggugaagggggaccugguacccagugauccccaccccaggauccuaaaucaugacuuaccugcuaauaaaaacucauuggaaaagugagaagaucuaaaaaaaaaaaaaaaaaaaaaaaaaaaaaaaaaaaaaaaaaaaaaaaaaaaaaaaaaaaaaaaaugcaucccccccccccccccccccccccccccccccaaaggcucuuuucagagccaccagaauu

SEQ ID NO: 20794 - RNA, 1095 nt, Artificial Sequence
  mRNA product Design e-6 comprising derived and/or modified sequence from HRSV(Memphis-37)__AIY60637.1__P (opt3)
gggagagcggcucggccauuuugucccagucaguccggaggcugcggcugcagaaguaccgccugcggaguaacugcaaagaagcuuaccauggagaaguucgcccccgaauuucacggcgaggacgcuaacaauagagcaaccaaauuccuggaaagcaucaaggggaaauuuacauccccuaaggauccgaaaaagaaggacucuauuauaucagugaacaguaucgauauugaggucacuaaagaaagcccaaucacguccaauucuaccauuaucaaccccacaaaugagacugacgauaccgccggaaacaagccuaauuaccagaggaaaccacucguuucguucaaggaggaccccacaccuucagauaacccauuuagcaaacuuuauaaggaaaccauagagacuuucgacaauaacgaagaggagaguuccuacucuuaugaagagaucaaugaucaaacaaacgacaauauuaccgcgcggcuggaucgcaucgacgaaaaguugagcgagauuuuagguaugcugcauacgcuagugguagcuuccgccggccccacuucagcacgagaugggauccgugacgccauggugggacucagagaagagaugauagagaaaauuaggaccgaagcucugaugacaaacgaccggcuugaggcaauggcccgccugagaaaugaagagagugaaaagauggcuaaagauacuagcgacgaggucucuuugaacccuaccuccgagaagcucaacaaucugcuggaaggcaacgauucagacaaugaucucagcuuagaggacuuuugaggacuaguacuggcugcaucucccuuuccucuguccuccauccuucucccaggauggugaagggggaccugguacccagugauccccaccccaggauccuaaaucaugacuuaccugcuaauaaaaacucauuggaaaagugagaagaucuaaaaaaaaaaaaaaaaaaaaaaaaaaaaaaaaaaaaaaaaaaaaaaaaaaaaaaaaaaaaaaaaugcaucccccccccccccccccccccccccccccccaaaggcucuuuucagagccaccagaauu

SEQ ID NO: 20795 - RNA, 1095 nt, Artificial Sequence
  mRNA product Design e-6 comprising derived and/or modified sequence from HRSV(Memphis-37)__AIY60637.1__P (opt4)
gggagagcggcucggccauuuugucccagucaguccggaggcugcggcugcagaaguaccgccugcggaguaacugcaaagaagcuuaccauggagaaguucgcccccgaguuccacggcgaggacgccaacaacagagccaccaaguuccuggagagcaucaagggcaaguucaccagccccaaggaccccaagaagaaggacagcaucaucagcgugaacagcaucgacaucgaggugaccaaggagagccccaucaccagcaacagcaccaucaucaaccccaccaacgagaccgacgacaccgccggcaacaagcccaacuaccagagaaagccccuggugagcuucaaggaggaccccacccccagcgacaaccccuucagcaagcuguacaaggagaccaucgagaccuucgacaacaacgaggaggagagcagcuacagcuacgaggagaucaacgaccagaccaacgacaacaucaccgccagacuggacagaaucgacgagaagcugagcgagauccugggcaugcugcacacccuggugguggccagcgccggccccaccagcgccagagacggcaucagagacgccauggugggccugagagaggagaugaucgagaagaucagaaccgaggcccugaugaccaacgacagacuggaggccauggccagacugagaaacgaggagagcgagaagauggccaaggacaccagcgacgaggugagccugaaccccaccagcgagaagcugaacaaccugcuggagggcaacgacagcgacaacgaccugagccuggaggacuucugaggacuaguacuggcugcaucucccuuuccucuguccuccauccuucucccaggauggugaagggggaccugguacccagugauccccaccccaggauccuaaaucaugacuuaccugcuaauaaaaacucauuggaaaagugagaagaucuaaaaaaaaaaaaaaaaaaaaaaaaaaaaaaaaaaaaaaaaaaaaaaaaaaaaaaaaaaaaaaaaugcaucccccccccccccccccccccccccccccccaaaggcucuuuucagagccaccagaauu

SEQ ID NO: 20796 - RNA, 1095 nt, Artificial Sequence
  mRNA product Design e-6 comprising derived and/or modified sequence from HRSV(Memphis-37)__AIY60637.1__P (opt5)
gggagagcggcucggccauuuugucccagucaguccggaggcugcggcugcagaaguaccgccugcggaguaacugcaaagaagcuuaccauggagaaguucgcccccgaauuucacggcgaggacgcuaacaauagagccaccaaauuccuggaaagcaucaaggggaaauuuacauccccuaaggauccgaaaaagaaggacucuauuaucagcgugaacuccauugauaucgaggucacgaaagaaucucccauuaccagcaauuccacaaucaucaacccuaccaaugagacagacgauaccgcgggaaacaagcccaauuaccagcggaaaccucucguuucuuucaaggaggaccccacaccuagcgauaacccguuuuccaaacuguauaaggaaaccauugagacguucgacaauaacgaagaggagagcucuuacuccuaugaagagaucaaugaucaaaccaacgacaauauuacagcucgccuugauagaaucgacgaaaagcugagcgagauucucggcaugcugcauacccuugugguggccucugccgggcccacauccgcucgggauggaauccgcgacgccauggucggccugagagaagagaugauugagaaaauccggaccgaagcucucaugacgaacgaccgccuggaggccauggcgagacugcggaaugaagagagcgaaaagauggccaaagauacaucugacgaggugucccucaacccuaccagcgagaagcugaacaaucuucuggaagggaacgauuccgacaaugaucucucucuggaggacuuuugaggacuaguacuggcugcaucucccuuuccucuguccuccauccuucucccaggauggugaagggggaccugguacccagugauccccaccccaggauccuaaaucaugacuuaccugcuaauaaaaacucauuggaaaagugagaagaucuaaaaaaaaaaaaaaaaaaaaaaaaaaaaaaaaaaaaaaaaaaaaaaaaaaaaaaaaaaaaaaaaugcaucccccccccccccccccccccccccccccccaaaggcucuuuucagagccaccagaauu

SEQ ID NO: 20797 - RNA, 1095 nt, Artificial Sequence
  mRNA product Design e-6 comprising derived and/or modified sequence from HRSV(Memphis-37)__AIY60637.1__P (opt6)
gggagagcggcucggccauuuugucccagucaguccggaggcugcggcugcagaaguaccgccugcggaguaacugcaaagaagcuuaccauggaaaaauucgcaccagaauuccacggagaagacgcaaacaacagagcaacaaaauuccuagaaucaauaaaaggaaaauucacaagcccaaaagaucccaaaaaaaaagacucaaucauaagcguaaacucaauagauauagaaguaacaaaagaaaguccaauaacaagcaacaguacaauaauaaacccaacaaaugaaacagacgauacagcaggcaacaaaccaaacuaccaaagaaaaccgcuaguaaguuucaaagaagacccaacaccaagcgauaacccauuuucaaaauuauacaaagaaacaauagaaacauucgacaacaacgaagaagaaagcucauacucauacgaagaaauaaacgaccaaacaaacgacaacauaacagcgagauuagacagaauagacgaaaaacuaucagaaauacuaggcauguuacacacauuaguaguagcaagcgcaggaccaacaucagcaagagacggaauccgagacgcaaugguaggacuaagagaagaaaugauagaaaaaauaagaacagaagcacuaaugacaaacgacagacuagaagccauggcaagacuaagaaacgaagaaucagaaaaaauggcaaaagacacaucagacgaaguaucacuaaacccaacaagcgaaaaacuaaacaaccuauuagaaggaaacgacagcgacaacgaccuaucacucgaagacuucuaaggacuaguacuggcugcaucucccuuuccucuguccuccauccuucucccaggauggugaagggggaccugguacccagugauccccaccccaggauccuaaaucaugacuuaccugcuaauaaaaacucauuggaaaagugagaagaucuaaaaaaaaaaaaaaaaaaaaaaaaaaaaaaaaaaaaaaaaaaaaaaaaaaaaaaaaaaaaaaaaugcaucccccccccccccccccccccccccccccccaaaggcucuuuucagagccaccagaauu

SEQ ID NO: 20798 - RNA, 1095 nt, Artificial Sequence
  mRNA product Design e-6 comprising derived and/or modified sequence from HRSV(Memphis-37)__AIY60637.1__P (opt11)
gggagagcggcucggccauuuugucccagucaguccggaggcugcggcugcagaaguaccgccugcggaguaacugcaaagaagcuuaccauggaaaaauucgccccagaauuucacggcgaagacgccaacaaccgagccaccaaauuccucgaaucaauaaaaggcaaauucacaucccccaaagaccccaaaaaaaaagacucgaucaucuccgugaacucaaucgacauagaagucaccaaagaaagccccaucaccuccaacagcaccaucaucaaccccacaaacgaaacagacgacaccgccggcaacaaaccaaacuaccaacgaaaaccccucgucagcuucaaagaagaccccacaccaagcgacaaccccuucuccaaacucuacaaagaaacaauagaaaccuucgacaacaacgaagaagaaagcucguacucauacgaagaaaucaacgaccaaaccaacgacaacaucaccgcccgccucgaccgcaucgacgaaaaacucuccgaaauccucggaaugcuccacacacucgucgucgccagcgccggccccaccucagcccgggacggcauccgcgacgccauggugggccuccgcgaggaaaugaucgaaaaaauccgcacagaagcccucaugaccaacgaccgccucgaagccauggcccgccuccgcaacgaagaauccgaaaaaauggccaaagacaccuccgacgaagucucacuaaaccccaccuccgaaaaacuaaacaaccuccuagaaggcaacgacagcgacaacgaccucucccuagaagacuucuaaggacuaguacuggcugcaucucccuuuccucuguccuccauccuucucccaggauggugaagggggaccugguacccagugauccccaccccaggauccuaaaucaugacuuaccugcuaauaaaaacucauuggaaaagugagaagaucuaaaaaaaaaaaaaaaaaaaaaaaaaaaaaaaaaaaaaaaaaaaaaaaaaaaaaaaaaaaaaaaaugcaucccccccccccccccccccccccccccccccaaaggcucuuuucagagccaccagaauu

SEQ ID NO: 20799 - RNA, 1311 nt, Artificial Sequence
  mRNA product Design f-1 comprising derived and/or modified sequence from HRSV(Memphis-37)__AIY60637.1__P (wt)
gggagagcggcucggccauuuugucccagucaguccggaggcugcggcugcagaaguaccgccugcggaguaacugcaaagaagcuuaccauggaaaaguuugcuccugaauuccauggagaagacgcaaacaacagagccacuaaauuccuagaaucaauaaagggcaaauucacaucaccuaaagaucccaagaaaaaagauaguaucauaucugucaacucaauagauauagaaguaaccaaagaaagcccuauaacuucaaauucaaccauuauaaacccuacaaaugagacagaugauacugcagggaacaagcccaauuaucaaagaaaaccacuagugaguuucaaagaagacccuacgccaagugauaaucccuuuucaaaacuauacaaagaaaccauagaaacauuugauaacaaugaagaagaaucuagcuauucauaugaagaaauaaaugaucagacaaacgauaauauaacagcaagauuagauaggauugaugaaaaauuaagugaaauacuaggaaugcuucacacacuaguaguagcaagugcaggaccuacaucugcucgggaugguauaagagaugccaugguugguuuaagagaagaaaugauagaaaaaaucagaacugaagcauugaugaccaaugauagauuagaagcuauggcaagacucaggaaugaggaaagugaaaagauggcaaaagacacaucagaugaagugucucucaauccaacaucagagaaauugaacaaccuguuggaaggaaaugauagugauaaugaucuaucacuugaagauuucugaggacuagugaagggaacacccaaauuuaauucagccuuaagcacaauuaauuaagagugaaacguaauuguacaagcaguuggucacccaccauagggcaugaucaacaccgcaaccuuuccuuuuucccccagugauucugaaaaaccccucuucccuucagcuugcuuagauguuccaaauuuaguaagcuuaaggcggccuacagaagaaaaagaaaaaaaaggccacaaaaguucccucucacuuucaguaaauaaaauaaaagcagcaacagaaauaaagaaauaaaugaaauucaaaaugaaauaaauauuguguugugcagcauuaaaaaaucaauaaaaauuaaaaaugagcaagaucuaaaaaaaaaaaaaaaaaaaaaaaaaaaaaaaaaaaaaaaaaaaaaaaaaaaaaaaaaaaaaaaaugcaucccccccccccccccccccccccccccccccaaaggcucuuuucagagccaccagaauu

SEQ ID NO: 20800 - RNA, 1311 nt, Artificial Sequence
  mRNA product Design f-1 comprising derived and/or modified sequence from HRSV(Memphis-37)__AIY60637.1__P (opt1)
gggagagcggcucggccauuuugucccagucaguccggaggcugcggcugcagaaguaccgccugcggaguaacugcaaagaagcuuaccauggagaaguucgcccccgaguuccacggcgaggacgccaacaaccgcgcgaccaaguuccuggagagcaucaaggggaaguucaccuccccgaaggaccccaagaagaaggacagcaucaucuccgugaacagcaucgacaucgaggucacgaaggagucccccaucaccagcaacuccaccaucaucaaccccaccaacgagacggacgacaccgccggcaacaagccgaacuaccagcggaagccccucgugagcuucaaggaggaccccacccccuccgacaacccguucagcaagcuguacaaggagaccaucgagacguucgacaacaacgaggaggaguccagcuacuccuacgaggagaucaacgaccagaccaacgacaacaucaccgcccgccuggaccggaucgacgagaagcucagcgagauccuggggaugcugcacacccucguggucgccuccgccggccccacgagcgcgcgcgacgggauccgggacgccauggugggccugcgcgaggagaugaucgagaagauccggaccgaggcccugaugaccaacgaccgccucgaggccauggcgcggcugcgcaacgaggaguccgagaagauggccaaggacaccagcgacgaggugucccugaaccccacgagcgagaagcucaacaaccugcuggagggcaacgacagcgacaacgaccucucccuggaggacuucugaggacuagugaagggaacacccaaauuuaauucagccuuaagcacaauuaauuaagagugaaacguaauuguacaagcaguuggucacccaccauagggcaugaucaacaccgcaaccuuuccuuuuucccccagugauucugaaaaaccccucuucccuucagcuugcuuagauguuccaaauuuaguaagcuuaaggcggccuacagaagaaaaagaaaaaaaaggccacaaaaguucccucucacuuucaguaaauaaaauaaaagcagcaacagaaauaaagaaauaaaugaaauucaaaaugaaauaaauauuguguugugcagcauuaaaaaaucaauaaaaauuaaaaaugagcaagaucuaaaaaaaaaaaaaaaaaaaaaaaaaaaaaaaaaaaaaaaaaaaaaaaaaaaaaaaaaaaaaaaaugcaucccccccccccccccccccccccccccccccaaaggcucuuuucagagccaccagaauu

SEQ ID NO: 20801 - RNA, 1311 nt, Artificial Sequence
  mRNA product Design f-1 comprising derived and/or modified sequence from HRSV(Memphis-37)__AIY60637.1__P (opt2)
gggagagcggcucggccauuuugucccagucaguccggaggcugcggcugcagaaguaccgccugcggaguaacugcaaagaagcuuaccauggagaaguucgcccccgaguuccacggcgaggacgccaacaaccgcgccaccaaguuccucgaguccaucaagggcaaguucaccucccccaaggaccccaagaagaaggacuccaucaucuccgucaacuccaucgacaucgaggucaccaaggagucccccaucaccuccaacuccaccaucaucaaccccaccaacgagaccgacgacaccgccggcaacaagcccaacuaccagcgcaagccccucgucuccuucaaggaggaccccacccccuccgacaaccccuucuccaagcucuacaaggagaccaucgagaccuucgacaacaacgaggaggaguccuccuacuccuacgaggagaucaacgaccagaccaacgacaacaucaccgcccgccucgaccgcaucgacgagaagcucuccgagauccucggcaugcuccacacccucgucgucgccuccgccggccccaccuccgcccgcgacggcauccgcgacgccauggucggccuccgcgaggagaugaucgagaagauccgcaccgaggcccucaugaccaacgaccgccucgaggccauggcccgccuccgcaacgaggaguccgagaagauggccaaggacaccuccgacgaggucucccucaaccccaccuccgagaagcucaacaaccuccucgagggcaacgacuccgacaacgaccucucccucgaggacuucugaggacuagugaagggaacacccaaauuuaauucagccuuaagcacaauuaauuaagagugaaacguaauuguacaagcaguuggucacccaccauagggcaugaucaacaccgcaaccuuuccuuuuucccccagugauucugaaaaaccccucuucccuucagcuugcuuagauguuccaaauuuaguaagcuuaaggcggccuacagaagaaaaagaaaaaaaaggccacaaaaguucccucucacuuucaguaaauaaaauaaaagcagcaacagaaauaaagaaauaaaugaaauucaaaaugaaauaaauauuguguugugcagcauuaaaaaaucaauaaaaauuaaaaaugagcaagaucuaaaaaaaaaaaaaaaaaaaaaaaaaaaaaaaaaaaaaaaaaaaaaaaaaaaaaaaaaaaaaaaaugcaucccccccccccccccccccccccccccccccaaaggcucuuuucagagccaccagaauu

SEQ ID NO: 20802 - RNA, 1311 nt, Artificial Sequence
  mRNA product Design f-1 comprising derived and/or modified sequence from HRSV(Memphis-37)__AIY60637.1__P (opt3)
gggagagcggcucggccauuuugucccagucaguccggaggcugcggcugcagaaguaccgccugcggaguaacugcaaagaagcuuaccauggagaaguucgcccccgaauuucacggcgaggacgcuaacaauagagcaaccaaauuccuggaaagcaucaaggggaaauuuacauccccuaaggauccgaaaaagaaggacucuauuauaucagugaacaguaucgauauugaggucacuaaagaaagcccaaucacguccaauucuaccauuaucaaccccacaaaugagacugacgauaccgccggaaacaagccuaauuaccagaggaaaccacucguuucguucaaggaggaccccacaccuucagauaacccauuuagcaaacuuuauaaggaaaccauagagacuuucgacaauaacgaagaggagaguuccuacucuuaugaagagaucaaugaucaaacaaacgacaauauuaccgcgcggcuggaucgcaucgacgaaaaguugagcgagauuuuagguaugcugcauacgcuagugguagcuuccgccggccccacuucagcacgagaugggauccgugacgccauggugggacucagagaagagaugauagagaaaauuaggaccgaagcucugaugacaaacgaccggcuugaggcaauggcccgccugagaaaugaagagagugaaaagauggcuaaagauacuagcgacgaggucucuuugaacccuaccuccgagaagcucaacaaucugcuggaaggcaacgauucagacaaugaucucagcuuagaggacuuuugaggacuagugaagggaacacccaaauuuaauucagccuuaagcacaauuaauuaagagugaaacguaauuguacaagcaguuggucacccaccauagggcaugaucaacaccgcaaccuuuccuuuuucccccagugauucugaaaaaccccucuucccuucagcuugcuuagauguuccaaauuuaguaagcuuaaggcggccuacagaagaaaaagaaaaaaaaggccacaaaaguucccucucacuuucaguaaauaaaauaaaagcagcaacagaaauaaagaaauaaaugaaauucaaaaugaaauaaauauuguguugugcagcauuaaaaaaucaauaaaaauuaaaaaugagcaagaucuaaaaaaaaaaaaaaaaaaaaaaaaaaaaaaaaaaaaaaaaaaaaaaaaaaaaaaaaaaaaaaaaugcaucccccccccccccccccccccccccccccccaaaggcucuuuucagagccaccagaauu

SEQ ID NO: 20803 - RNA, 1311 nt, Artificial Sequence
  mRNA product Design f-1 comprising derived and/or modified sequence from HRSV(Memphis-37)__AIY60637.1__P (opt4)
gggagagcggcucggccauuuugucccagucaguccggaggcugcggcugcagaaguaccgccugcggaguaacugcaaagaagcuuaccauggagaaguucgcccccgaguuccacggcgaggacgccaacaacagagccaccaaguuccuggagagcaucaagggcaaguucaccagccccaaggaccccaagaagaaggacagcaucaucagcgugaacagcaucgacaucgaggugaccaaggagagccccaucaccagcaacagcaccaucaucaaccccaccaacgagaccgacgacaccgccggcaacaagcccaacuaccagagaaagccccuggugagcuucaaggaggaccccacccccagcgacaaccccuucagcaagcuguacaaggagaccaucgagaccuucgacaacaacgaggaggagagcagcuacagcuacgaggagaucaacgaccagaccaacgacaacaucaccgccagacuggacagaaucgacgagaagcugagcgagauccugggcaugcugcacacccuggugguggccagcgccggccccaccagcgccagagacggcaucagagacgccauggugggccugagagaggagaugaucgagaagaucagaaccgaggcccugaugaccaacgacagacuggaggccauggccagacugagaaacgaggagagcgagaagauggccaaggacaccagcgacgaggugagccugaaccccaccagcgagaagcugaacaaccugcuggagggcaacgacagcgacaacgaccugagccuggaggacuucugaggacuagugaagggaacacccaaauuuaauucagccuuaagcacaauuaauuaagagugaaacguaauuguacaagcaguuggucacccaccauagggcaugaucaacaccgcaaccuuuccuuuuucccccagugauucugaaaaaccccucuucccuucagcuugcuuagauguuccaaauuuaguaagcuuaaggcggccuacagaagaaaaagaaaaaaaaggccacaaaaguucccucucacuuucaguaaauaaaauaaaagcagcaacagaaauaaagaaauaaaugaaauucaaaaugaaauaaauauuguguugugcagcauuaaaaaaucaauaaaaauuaaaaaugagcaagaucuaaaaaaaaaaaaaaaaaaaaaaaaaaaaaaaaaaaaaaaaaaaaaaaaaaaaaaaaaaaaaaaaugcaucccccccccccccccccccccccccccccccaaaggcucuuuucagagccaccagaauu

SEQ ID NO: 20804 - RNA, 1311 nt, Artificial Sequence
  mRNA product Design f-1 comprising derived and/or modified sequence from HRSV(Memphis-37)__AIY60637.1__P (opt5)
gggagagcggcucggccauuuugucccagucaguccggaggcugcggcugcagaaguaccgccugcggaguaacugcaaagaagcuuaccauggagaaguucgcccccgaauuucacggcgaggacgcuaacaauagagccaccaaauuccuggaaagcaucaaggggaaauuuacauccccuaaggauccgaaaaagaaggacucuauuaucagcgugaacuccauugauaucgaggucacgaaagaaucucccauuaccagcaauuccacaaucaucaacccuaccaaugagacagacgauaccgcgggaaacaagcccaauuaccagcggaaaccucucguuucuuucaaggaggaccccacaccuagcgauaacccguuuuccaaacuguauaaggaaaccauugagacguucgacaauaacgaagaggagagcucuuacuccuaugaagagaucaaugaucaaaccaacgacaauauuacagcucgccuugauagaaucgacgaaaagcugagcgagauucucggcaugcugcauacccuugugguggccucugccgggcccacauccgcucgggauggaauccgcgacgccauggucggccugagagaagagaugauugagaaaauccggaccgaagcucucaugacgaacgaccgccuggaggccauggcgagacugcggaaugaagagagcgaaaagauggccaaagauacaucugacgaggugucccucaacccuaccagcgagaagcugaacaaucuucuggaagggaacgauuccgacaaugaucucucucuggaggacuuuugaggacuagugaagggaacacccaaauuuaauucagccuuaagcacaauuaauuaagagugaaacguaauuguacaagcaguuggucacccaccauagggcaugaucaacaccgcaaccuuuccuuuuucccccagugauucugaaaaaccccucuucccuucagcuugcuuagauguuccaaauuuaguaagcuuaaggcggccuacagaagaaaaagaaaaaaaaggccacaaaaguucccucucacuuucaguaaauaaaauaaaagcagcaacagaaauaaagaaauaaaugaaauucaaaaugaaauaaauauuguguugugcagcauuaaaaaaucaauaaaaauuaaaaaugagcaagaucuaaaaaaaaaaaaaaaaaaaaaaaaaaaaaaaaaaaaaaaaaaaaaaaaaaaaaaaaaaaaaaaaugcaucccccccccccccccccccccccccccccccaaaggcucuuuucagagccaccagaauu

SEQ ID NO: 20805 - RNA, 1311 nt, Artificial Sequence
  mRNA product Design f-1 comprising derived and/or modified sequence from HRSV(Memphis-37)__AIY60637.1__P (opt6)
gggagagcggcucggccauuuugucccagucaguccggaggcugcggcugcagaaguaccgccugcggaguaacugcaaagaagcuuaccauggaaaaauucgcaccagaauuccacggagaagacgcaaacaacagagcaacaaaauuccuagaaucaauaaaaggaaaauucacaagcccaaaagaucccaaaaaaaaagacucaaucauaagcguaaacucaauagauauagaaguaacaaaagaaaguccaauaacaagcaacaguacaauaauaaacccaacaaaugaaacagacgauacagcaggcaacaaaccaaacuaccaaagaaaaccgcuaguaaguuucaaagaagacccaacaccaagcgauaacccauuuucaaaauuauacaaagaaacaauagaaacauucgacaacaacgaagaagaaagcucauacucauacgaagaaauaaacgaccaaacaaacgacaacauaacagcgagauuagacagaauagacgaaaaacuaucagaaauacuaggcauguuacacacauuaguaguagcaagcgcaggaccaacaucagcaagagacggaauccgagacgcaaugguaggacuaagagaagaaaugauagaaaaaauaagaacagaagcacuaaugacaaacgacagacuagaagccauggcaagacuaagaaacgaagaaucagaaaaaauggcaaaagacacaucagacgaaguaucacuaaacccaacaagcgaaaaacuaaacaaccuauuagaaggaaacgacagcgacaacgaccuaucacucgaagacuucuaaggacuagugaagggaacacccaaauuuaauucagccuuaagcacaauuaauuaagagugaaacguaauuguacaagcaguuggucacccaccauagggcaugaucaacaccgcaaccuuuccuuuuucccccagugauucugaaaaaccccucuucccuucagcuugcuuagauguuccaaauuuaguaagcuuaaggcggccuacagaagaaaaagaaaaaaaaggccacaaaaguucccucucacuuucaguaaauaaaauaaaagcagcaacagaaauaaagaaauaaaugaaauucaaaaugaaauaaauauuguguugugcagcauuaaaaaaucaauaaaaauuaaaaaugagcaagaucuaaaaaaaaaaaaaaaaaaaaaaaaaaaaaaaaaaaaaaaaaaaaaaaaaaaaaaaaaaaaaaaaugcaucccccccccccccccccccccccccccccccaaaggcucuuuucagagccaccagaauu

SEQ ID NO: 20806 - RNA, 1311 nt, Artificial Sequence
  mRNA product Design f-1 comprising derived and/or modified sequence from HRSV(Memphis-37)__AIY60637.1__P (opt11)
gggagagcggcucggccauuuugucccagucaguccggaggcugcggcugcagaaguaccgccugcggaguaacugcaaagaagcuuaccauggaaaaauucgccccagaauuucacggcgaagacgccaacaaccgagccaccaaauuccucgaaucaauaaaaggcaaauucacaucccccaaagaccccaaaaaaaaagacucgaucaucuccgugaacucaaucgacauagaagucaccaaagaaagccccaucaccuccaacagcaccaucaucaaccccacaaacgaaacagacgacaccgccggcaacaaaccaaacuaccaacgaaaaccccucgucagcuucaaagaagaccccacaccaagcgacaaccccuucuccaaacucuacaaagaaacaauagaaaccuucgacaacaacgaagaagaaagcucguacucauacgaagaaaucaacgaccaaaccaacgacaacaucaccgcccgccucgaccgcaucgacgaaaaacucuccgaaauccucggaaugcuccacacacucgucgucgccagcgccggccccaccucagcccgggacggcauccgcgacgccauggugggccuccgcgaggaaaugaucgaaaaaauccgcacagaagcccucaugaccaacgaccgccucgaagccauggcccgccuccgcaacgaagaauccgaaaaaauggccaaagacaccuccgacgaagucucacuaaaccccaccuccgaaaaacuaaacaaccuccuagaaggcaacgacagcgacaacgaccucucccuagaagacuucuaaggacuagugaagggaacacccaaauuuaauucagccuuaagcacaauuaauuaagagugaaacguaauuguacaagcaguuggucacccaccauagggcaugaucaacaccgcaaccuuuccuuuuucccccagugauucugaaaaaccccucuucccuucagcuugcuuagauguuccaaauuuaguaagcuuaaggcggccuacagaagaaaaagaaaaaaaaggccacaaaaguucccucucacuuucaguaaauaaaauaaaagcagcaacagaaauaaagaaauaaaugaaauucaaaaugaaauaaauauuguguugugcagcauuaaaaaaucaauaaaaauuaaaaaugagcaagaucuaaaaaaaaaaaaaaaaaaaaaaaaaaaaaaaaaaaaaaaaaaaaaaaaaaaaaaaaaaaaaaaaugcaucccccccccccccccccccccccccccccccaaaggcucuuuucagagccaccagaauu

SEQ ID NO: 20807 - RNA, 1091 nt, Artificial Sequence
  mRNA product Design f-2 comprising derived and/or modified sequence from HRSV(Memphis-37)__AIY60637.1__P (wt)
gggagagcggcucggccauuuugucccagucaguccggaggcugcggcugcagaaguaccgccugcggaguaacugcaaagaagcuuaccauggaaaaguuugcuccugaauuccauggagaagacgcaaacaacagagccacuaaauuccuagaaucaauaaagggcaaauucacaucaccuaaagaucccaagaaaaaagauaguaucauaucugucaacucaauagauauagaaguaaccaaagaaagcccuauaacuucaaauucaaccauuauaaacccuacaaaugagacagaugauacugcagggaacaagcccaauuaucaaagaaaaccacuagugaguuucaaagaagacccuacgccaagugauaaucccuuuucaaaacuauacaaagaaaccauagaaacauuugauaacaaugaagaagaaucuagcuauucauaugaagaaauaaaugaucagacaaacgauaauauaacagcaagauuagauaggauugaugaaaaauuaagugaaauacuaggaaugcuucacacacuaguaguagcaagugcaggaccuacaucugcucgggaugguauaagagaugccaugguugguuuaagagaagaaaugauagaaaaaaucagaacugaagcauugaugaccaaugauagauuagaagcuauggcaagacucaggaaugaggaaagugaaaagauggcaaaagacacaucagaugaagugucucucaauccaacaucagagaaauugaacaaccuguuggaaggaaaugauagugauaaugaucuaucacuugaagauuucugaggacuaguggaagcauuuuccuggcugauuaaaagaaauuacucagcuauggucaucuguuccuguuagaaggcuaugcagcauauuauauacuaugcgcauguuaugaaaugcauaauaaaaaauuuuaaaaaaucuaaaagaucuaaaaaaaaaaaaaaaaaaaaaaaaaaaaaaaaaaaaaaaaaaaaaaaaaaaaaaaaaaaaaaaaugcaucccccccccccccccccccccccccccccccaaaggcucuuuucagagccaccagaauu

SEQ ID NO: 20808 - RNA, 1091 nt, Artificial Sequence
  mRNA product Design f-2 comprising derived and/or modified sequence from HRSV(Memphis-37)__AIY60637.1__P (opt1)
gggagagcggcucggccauuuugucccagucaguccggaggcugcggcugcagaaguaccgccugcggaguaacugcaaagaagcuuaccauggagaaguucgcccccgaguuccacggcgaggacgccaacaaccgcgcgaccaaguuccuggagagcaucaaggggaaguucaccuccccgaaggaccccaagaagaaggacagcaucaucuccgugaacagcaucgacaucgaggucacgaaggagucccccaucaccagcaacuccaccaucaucaaccccaccaacgagacggacgacaccgccggcaacaagccgaacuaccagcggaagccccucgugagcuucaaggaggaccccacccccuccgacaacccguucagcaagcuguacaaggagaccaucgagacguucgacaacaacgaggaggaguccagcuacuccuacgaggagaucaacgaccagaccaacgacaacaucaccgcccgccuggaccggaucgacgagaagcucagcgagauccuggggaugcugcacacccucguggucgccuccgccggccccacgagcgcgcgcgacgggauccgggacgccauggugggccugcgcgaggagaugaucgagaagauccggaccgaggcccugaugaccaacgaccgccucgaggccauggcgcggcugcgcaacgaggaguccgagaagauggccaaggacaccagcgacgaggugucccugaaccccacgagcgagaagcucaacaaccugcuggagggcaacgacagcgacaacgaccucucccuggaggacuucugaggacuaguggaagcauuuuccuggcugauuaaaagaaauuacucagcuauggucaucuguuccuguuagaaggcuaugcagcauauuauauacuaugcgcauguuaugaaaugcauaauaaaaaauuuuaaaaaaucuaaaagaucuaaaaaaaaaaaaaaaaaaaaaaaaaaaaaaaaaaaaaaaaaaaaaaaaaaaaaaaaaaaaaaaaugcaucccccccccccccccccccccccccccccccaaaggcucuuuucagagccaccagaauu

SEQ ID NO: 20809 - RNA, 1091 nt, Artificial Sequence
  mRNA product Design f-2 comprising derived and/or modified sequence from HRSV(Memphis-37)__AIY60637.1__P (opt2)
gggagagcggcucggccauuuugucccagucaguccggaggcugcggcugcagaaguaccgccugcggaguaacugcaaagaagcuuaccauggagaaguucgcccccgaguuccacggcgaggacgccaacaaccgcgccaccaaguuccucgaguccaucaagggcaaguucaccucccccaaggaccccaagaagaaggacuccaucaucuccgucaacuccaucgacaucgaggucaccaaggagucccccaucaccuccaacuccaccaucaucaaccccaccaacgagaccgacgacaccgccggcaacaagcccaacuaccagcgcaagccccucgucuccuucaaggaggaccccacccccuccgacaaccccuucuccaagcucuacaaggagaccaucgagaccuucgacaacaacgaggaggaguccuccuacuccuacgaggagaucaacgaccagaccaacgacaacaucaccgcccgccucgaccgcaucgacgagaagcucuccgagauccucggcaugcuccacacccucgucgucgccuccgccggccccaccuccgcccgcgacggcauccgcgacgccauggucggccuccgcgaggagaugaucgagaagauccgcaccgaggcccucaugaccaacgaccgccucgaggccauggcccgccuccgcaacgaggaguccgagaagauggccaaggacaccuccgacgaggucucccucaaccccaccuccgagaagcucaacaaccuccucgagggcaacgacuccgacaacgaccucucccucgaggacuucugaggacuaguggaagcauuuuccuggcugauuaaaagaaauuacucagcuauggucaucuguuccuguuagaaggcuaugcagcauauuauauacuaugcgcauguuaugaaaugcauaauaaaaaauuuuaaaaaaucuaaaagaucuaaaaaaaaaaaaaaaaaaaaaaaaaaaaaaaaaaaaaaaaaaaaaaaaaaaaaaaaaaaaaaaaugcaucccccccccccccccccccccccccccccccaaaggcucuuuucagagccaccagaauu

SEQ ID NO: 20810 - RNA, 1091 nt, Artificial Sequence
  mRNA product Design f-2 comprising derived and/or modified sequence from HRSV(Memphis-37)__AIY60637.1__P (opt3)
gggagagcggcucggccauuuugucccagucaguccggaggcugcggcugcagaaguaccgccugcggaguaacugcaaagaagcuuaccauggagaaguucgcccccgaauuucacggcgaggacgcuaacaauagagcaaccaaauuccuggaaagcaucaaggggaaauuuacauccccuaaggauccgaaaaagaaggacucuauuauaucagugaacaguaucgauauugaggucacuaaagaaagcccaaucacguccaauucuaccauuaucaaccccacaaaugagacugacgauaccgccggaaacaagccuaauuaccagaggaaaccacucguuucguucaaggaggaccccacaccuucagauaacccauuuagcaaacuuuauaaggaaaccauagagacuuucgacaauaacgaagaggagaguuccuacucuuaugaagagaucaaugaucaaacaaacgacaauauuaccgcgcggcuggaucgcaucgacgaaaaguugagcgagauuuuagguaugcugcauacgcuagugguagcuuccgccggccccacuucagcacgagaugggauccgugacgccauggugggacucagagaagagaugauagagaaaauuaggaccgaagcucugaugacaaacgaccggcuugaggcaauggcccgccugagaaaugaagagagugaaaagauggcuaaagauacuagcgacgaggucucuuugaacccuaccuccgagaagcucaacaaucugcuggaaggcaacgauucagacaaugaucucagcuuagaggacuuuugaggacuaguggaagcauuuuccuggcugauuaaaagaaauuacucagcuauggucaucuguuccuguuagaaggcuaugcagcauauuauauacuaugcgcauguuaugaaaugcauaauaaaaaauuuuaaaaaaucuaaaagaucuaaaaaaaaaaaaaaaaaaaaaaaaaaaaaaaaaaaaaaaaaaaaaaaaaaaaaaaaaaaaaaaaugcaucccccccccccccccccccccccccccccccaaaggcucuuuucagagccaccagaauu

SEQ ID NO: 20811 - RNA, 1091 nt, Artificial Sequence
  mRNA product Design f-2 comprising derived and/or modified sequence from HRSV(Memphis-37)__AIY60637.1__P (opt4)
gggagagcggcucggccauuuugucccagucaguccggaggcugcggcugcagaaguaccgccugcggaguaacugcaaagaagcuuaccauggagaaguucgcccccgaguuccacggcgaggacgccaacaacagagccaccaaguuccuggagagcaucaagggcaaguucaccagccccaaggaccccaagaagaaggacagcaucaucagcgugaacagcaucgacaucgaggugaccaaggagagccccaucaccagcaacagcaccaucaucaaccccaccaacgagaccgacgacaccgccggcaacaagcccaacuaccagagaaagccccuggugagcuucaaggaggaccccacccccagcgacaaccccuucagcaagcuguacaaggagaccaucgagaccuucgacaacaacgaggaggagagcagcuacagcuacgaggagaucaacgaccagaccaacgacaacaucaccgccagacuggacagaaucgacgagaagcugagcgagauccugggcaugcugcacacccuggugguggccagcgccggccccaccagcgccagagacggcaucagagacgccauggugggccugagagaggagaugaucgagaagaucagaaccgaggcccugaugaccaacgacagacuggaggccauggccagacugagaaacgaggagagcgagaagauggccaaggacaccagcgacgaggugagccugaaccccaccagcgagaagcugaacaaccugcuggagggcaacgacagcgacaacgaccugagccuggaggacuucugaggacuaguggaagcauuuuccuggcugauuaaaagaaauuacucagcuauggucaucuguuccuguuagaaggcuaugcagcauauuauauacuaugcgcauguuaugaaaugcauaauaaaaaauuuuaaaaaaucuaaaagaucuaaaaaaaaaaaaaaaaaaaaaaaaaaaaaaaaaaaaaaaaaaaaaaaaaaaaaaaaaaaaaaaaugcaucccccccccccccccccccccccccccccccaaaggcucuuuucagagccaccagaauu

SEQ ID NO: 20812 - RNA, 1091 nt, Artificial Sequence
  mRNA product Design f-2 comprising derived and/or modified sequence from HRSV(Memphis-37)__AIY60637.1__P (opt5)
gggagagcggcucggccauuuugucccagucaguccggaggcugcggcugcagaaguaccgccugcggaguaacugcaaagaagcuuaccauggagaaguucgcccccgaauuucacggcgaggacgcuaacaauagagccaccaaauuccuggaaagcaucaaggggaaauuuacauccccuaaggauccgaaaaagaaggacucuauuaucagcgugaacuccauugauaucgaggucacgaaagaaucucccauuaccagcaauuccacaaucaucaacccuaccaaugagacagacgauaccgcgggaaacaagcccaauuaccagcggaaaccucucguuucuuucaaggaggaccccacaccuagcgauaacccguuuuccaaacuguauaaggaaaccauugagacguucgacaauaacgaagaggagagcucuuacuccuaugaagagaucaaugaucaaaccaacgacaauauuacagcucgccuugauagaaucgacgaaaagcugagcgagauucucggcaugcugcauacccuugugguggccucugccgggcccacauccgcucgggauggaauccgcgacgccauggucggccugagagaagagaugauugagaaaauccggaccgaagcucucaugacgaacgaccgccuggaggccauggcgagacugcggaaugaagagagcgaaaagauggccaaagauacaucugacgaggugucccucaacccuaccagcgagaagcugaacaaucuucuggaagggaacgauuccgacaaugaucucucucuggaggacuuuugaggacuaguggaagcauuuuccuggcugauuaaaagaaauuacucagcuauggucaucuguuccuguuagaaggcuaugcagcauauuauauacuaugcgcauguuaugaaaugcauaauaaaaaauuuuaaaaaaucuaaaagaucuaaaaaaaaaaaaaaaaaaaaaaaaaaaaaaaaaaaaaaaaaaaaaaaaaaaaaaaaaaaaaaaaugcaucccccccccccccccccccccccccccccccaaaggcucuuuucagagccaccagaauu

SEQ ID NO: 20813 - RNA, 1091 nt, Artificial Sequence
  mRNA product Design f-2 comprising derived and/or modified sequence from HRSV(Memphis-37)__AIY60637.1__P (opt6)
gggagagcggcucggccauuuugucccagucaguccggaggcugcggcugcagaaguaccgccugcggaguaacugcaaagaagcuuaccauggaaaaauucgcaccagaauuccacggagaagacgcaaacaacagagcaacaaaauuccuagaaucaauaaaaggaaaauucacaagcccaaaagaucccaaaaaaaaagacucaaucauaagcguaaacucaauagauauagaaguaacaaaagaaaguccaauaacaagcaacaguacaauaauaaacccaacaaaugaaacagacgauacagcaggcaacaaaccaaacuaccaaagaaaaccgcuaguaaguuucaaagaagacccaacaccaagcgauaacccauuuucaaaauuauacaaagaaacaauagaaacauucgacaacaacgaagaagaaagcucauacucauacgaagaaauaaacgaccaaacaaacgacaacauaacagcgagauuagacagaauagacgaaaaacuaucagaaauacuaggcauguuacacacauuaguaguagcaagcgcaggaccaacaucagcaagagacggaauccgagacgcaaugguaggacuaagagaagaaaugauagaaaaaauaagaacagaagcacuaaugacaaacgacagacuagaagccauggcaagacuaagaaacgaagaaucagaaaaaauggcaaaagacacaucagacgaaguaucacuaaacccaacaagcgaaaaacuaaacaaccuauuagaaggaaacgacagcgacaacgaccuaucacucgaagacuucuaaggacuaguggaagcauuuuccuggcugauuaaaagaaauuacucagcuauggucaucuguuccuguuagaaggcuaugcagcauauuauauacuaugcgcauguuaugaaaugcauaauaaaaaauuuuaaaaaaucuaaaagaucuaaaaaaaaaaaaaaaaaaaaaaaaaaaaaaaaaaaaaaaaaaaaaaaaaaaaaaaaaaaaaaaaugcaucccccccccccccccccccccccccccccccaaaggcucuuuucagagccaccagaauu

SEQ ID NO: 20814 - RNA, 1091 nt, Artificial Sequence
  mRNA product Design f-2 comprising derived and/or modified sequence from HRSV(Memphis-37)__AIY60637.1__P (opt11)
gggagagcggcucggccauuuugucccagucaguccggaggcugcggcugcagaaguaccgccugcggaguaacugcaaagaagcuuaccauggaaaaauucgccccagaauuucacggcgaagacgccaacaaccgagccaccaaauuccucgaaucaauaaaaggcaaauucacaucccccaaagaccccaaaaaaaaagacucgaucaucuccgugaacucaaucgacauagaagucaccaaagaaagccccaucaccuccaacagcaccaucaucaaccccacaaacgaaacagacgacaccgccggcaacaaaccaaacuaccaacgaaaaccccucgucagcuucaaagaagaccccacaccaagcgacaaccccuucuccaaacucuacaaagaaacaauagaaaccuucgacaacaacgaagaagaaagcucguacucauacgaagaaaucaacgaccaaaccaacgacaacaucaccgcccgccucgaccgcaucgacgaaaaacucuccgaaauccucggaaugcuccacacacucgucgucgccagcgccggccccaccucagcccgggacggcauccgcgacgccauggugggccuccgcgaggaaaugaucgaaaaaauccgcacagaagcccucaugaccaacgaccgccucgaagccauggcccgccuccgcaacgaagaauccgaaaaaauggccaaagacaccuccgacgaagucucacuaaaccccaccuccgaaaaacuaaacaaccuccuagaaggcaacgacagcgacaacgaccucucccuagaagacuucuaaggacuaguggaagcauuuuccuggcugauuaaaagaaauuacucagcuauggucaucuguuccuguuagaaggcuaugcagcauauuauauacuaugcgcauguuaugaaaugcauaauaaaaaauuuuaaaaaaucuaaaagaucuaaaaaaaaaaaaaaaaaaaaaaaaaaaaaaaaaaaaaaaaaaaaaaaaaaaaaaaaaaaaaaaaugcaucccccccccccccccccccccccccccccccaaaggcucuuuucagagccaccagaauu

SEQ ID NO: 20815 - RNA, 1082 nt, Artificial Sequence
  mRNA product Design f-3 comprising derived and/or modified sequence from HRSV(Memphis-37)__AIY60637.1__P (wt)
gggagagucccgcagucggcguccagcggcucugcuuguucgugugugugucguugcaggccuuauucaagcuuaccauggaaaaguuugcuccugaauuccauggagaagacgcaaacaacagagccacuaaauuccuagaaucaauaaagggcaaauucacaucaccuaaagaucccaagaaaaaagauaguaucauaucugucaacucaauagauauagaaguaaccaaagaaagcccuauaacuucaaauucaaccauuauaaacccuacaaaugagacagaugauacugcagggaacaagcccaauuaucaaagaaaaccacuagugaguuucaaagaagacccuacgccaagugauaaucccuuuucaaaacuauacaaagaaaccauagaaacauuugauaacaaugaagaagaaucuagcuauucauaugaagaaauaaaugaucagacaaacgauaauauaacagcaagauuagauaggauugaugaaaaauuaagugaaauacuaggaaugcuucacacacuaguaguagcaagugcaggaccuacaucugcucgggaugguauaagagaugccaugguugguuuaagagaagaaaugauagaaaaaaucagaacugaagcauugaugaccaaugauagauuagaagcuauggcaagacucaggaaugaggaaagugaaaagauggcaaaagacacaucagaugaagugucucucaauccaacaucagagaaauugaacaaccuguuggaaggaaaugauagugauaaugaucuaucacuugaagauuucugaggacuaguacuggcugcaucucccuuuccucuguccuccauccuucucccaggauggugaagggggaccugguacccagugauccccaccccaggauccuaaaucaugacuuaccugcuaauaaaaacucauuggaaaagugagaagaucuaaaaaaaaaaaaaaaaaaaaaaaaaaaaaaaaaaaaaaaaaaaaaaaaaaaaaaaaaaaaaaaaugcaucccccccccccccccccccccccccccccccaaaggcucuuuucagagccaccagaauu

SEQ ID NO: 20816 - RNA, 1082 nt, Artificial Sequence
  mRNA product Design f-3 comprising derived and/or modified sequence from HRSV(Memphis-37)__AIY60637.1__P (opt1)
gggagagucccgcagucggcguccagcggcucugcuuguucgugugugugucguugcaggccuuauucaagcuuaccauggagaaguucgcccccgaguuccacggcgaggacgccaacaaccgcgcgaccaaguuccuggagagcaucaaggggaaguucaccuccccgaaggaccccaagaagaaggacagcaucaucuccgugaacagcaucgacaucgaggucacgaaggagucccccaucaccagcaacuccaccaucaucaaccccaccaacgagacggacgacaccgccggcaacaagccgaacuaccagcggaagccccucgugagcuucaaggaggaccccacccccuccgacaacccguucagcaagcuguacaaggagaccaucgagacguucgacaacaacgaggaggaguccagcuacuccuacgaggagaucaacgaccagaccaacgacaacaucaccgcccgccuggaccggaucgacgagaagcucagcgagauccuggggaugcugcacacccucguggucgccuccgccggccccacgagcgcgcgcgacgggauccgggacgccauggugggccugcgcgaggagaugaucgagaagauccggaccgaggcccugaugaccaacgaccgccucgaggccauggcgcggcugcgcaacgaggaguccgagaagauggccaaggacaccagcgacgaggugucccugaaccccacgagcgagaagcucaacaaccugcuggagggcaacgacagcgacaacgaccucucccuggaggacuucugaggacuaguacuggcugcaucucccuuuccucuguccuccauccuucucccaggauggugaagggggaccugguacccagugauccccaccccaggauccuaaaucaugacuuaccugcuaauaaaaacucauuggaaaagugagaagaucuaaaaaaaaaaaaaaaaaaaaaaaaaaaaaaaaaaaaaaaaaaaaaaaaaaaaaaaaaaaaaaaaugcaucccccccccccccccccccccccccccccccaaaggcucuuuucagagccaccagaauu

SEQ ID NO: 20817 - RNA, 1082 nt, Artificial Sequence
  mRNA product Design f-3 comprising derived and/or modified sequence from HRSV(Memphis-37)__AIY60637.1__P (opt2)
gggagagucccgcagucggcguccagcggcucugcuuguucgugugugugucguugcaggccuuauucaagcuuaccauggagaaguucgcccccgaguuccacggcgaggacgccaacaaccgcgccaccaaguuccucgaguccaucaagggcaaguucaccucccccaaggaccccaagaagaaggacuccaucaucuccgucaacuccaucgacaucgaggucaccaaggagucccccaucaccuccaacuccaccaucaucaaccccaccaacgagaccgacgacaccgccggcaacaagcccaacuaccagcgcaagccccucgucuccuucaaggaggaccccacccccuccgacaaccccuucuccaagcucuacaaggagaccaucgagaccuucgacaacaacgaggaggaguccuccuacuccuacgaggagaucaacgaccagaccaacgacaacaucaccgcccgccucgaccgcaucgacgagaagcucuccgagauccucggcaugcuccacacccucgucgucgccuccgccggccccaccuccgcccgcgacggcauccgcgacgccauggucggccuccgcgaggagaugaucgagaagauccgcaccgaggcccucaugaccaacgaccgccucgaggccauggcccgccuccgcaacgaggaguccgagaagauggccaaggacaccuccgacgaggucucccucaaccccaccuccgagaagcucaacaaccuccucgagggcaacgacuccgacaacgaccucucccucgaggacuucugaggacuaguacuggcugcaucucccuuuccucuguccuccauccuucucccaggauggugaagggggaccugguacccagugauccccaccccaggauccuaaaucaugacuuaccugcuaauaaaaacucauuggaaaagugagaagaucuaaaaaaaaaaaaaaaaaaaaaaaaaaaaaaaaaaaaaaaaaaaaaaaaaaaaaaaaaaaaaaaaugcaucccccccccccccccccccccccccccccccaaaggcucuuuucagagccaccagaauu

SEQ ID NO: 20818 - RNA, 1082 nt, Artificial Sequence
  mRNA product Design f-3 comprising derived and/or modified sequence from HRSV(Memphis-37)__AIY60637.1__P (opt3)
gggagagucccgcagucggcguccagcggcucugcuuguucgugugugugucguugcaggccuuauucaagcuuaccauggagaaguucgcccccgaauuucacggcgaggacgcuaacaauagagcaaccaaauuccuggaaagcaucaaggggaaauuuacauccccuaaggauccgaaaaagaaggacucuauuauaucagugaacaguaucgauauugaggucacuaaagaaagcccaaucacguccaauucuaccauuaucaaccccacaaaugagacugacgauaccgccggaaacaagccuaauuaccagaggaaaccacucguuucguucaaggaggaccccacaccuucagauaacccauuuagcaaacuuuauaaggaaaccauagagacuuucgacaauaacgaagaggagaguuccuacucuuaugaagagaucaaugaucaaacaaacgacaauauuaccgcgcggcuggaucgcaucgacgaaaaguugagcgagauuuuagguaugcugcauacgcuagugguagcuuccgccggccccacuucagcacgagaugggauccgugacgccauggugggacucagagaagagaugauagagaaaauuaggaccgaagcucugaugacaaacgaccggcuugaggcaauggcccgccugagaaaugaagagagugaaaagauggcuaaagauacuagcgacgaggucucuuugaacccuaccuccgagaagcucaacaaucugcuggaaggcaacgauucagacaaugaucucagcuuagaggacuuuugaggacuaguacuggcugcaucucccuuuccucuguccuccauccuucucccaggauggugaagggggaccugguacccagugauccccaccccaggauccuaaaucaugacuuaccugcuaauaaaaacucauuggaaaagugagaagaucuaaaaaaaaaaaaaaaaaaaaaaaaaaaaaaaaaaaaaaaaaaaaaaaaaaaaaaaaaaaaaaaaugcaucccccccccccccccccccccccccccccccaaaggcucuuuucagagccaccagaauu

SEQ ID NO: 20819 - RNA, 1082 nt, Artificial Sequence
  mRNA product Design f-3 comprising derived and/or modified sequence from HRSV(Memphis-37)__AIY60637.1__P (opt4)
gggagagucccgcagucggcguccagcggcucugcuuguucgugugugugucguugcaggccuuauucaagcuuaccauggagaaguucgcccccgaguuccacggcgaggacgccaacaacagagccaccaaguuccuggagagcaucaagggcaaguucaccagccccaaggaccccaagaagaaggacagcaucaucagcgugaacagcaucgacaucgaggugaccaaggagagccccaucaccagcaacagcaccaucaucaaccccaccaacgagaccgacgacaccgccggcaacaagcccaacuaccagagaaagccccuggugagcuucaaggaggaccccacccccagcgacaaccccuucagcaagcuguacaaggagaccaucgagaccuucgacaacaacgaggaggagagcagcuacagcuacgaggagaucaacgaccagaccaacgacaacaucaccgccagacuggacagaaucgacgagaagcugagcgagauccugggcaugcugcacacccuggugguggccagcgccggccccaccagcgccagagacggcaucagagacgccauggugggccugagagaggagaugaucgagaagaucagaaccgaggcccugaugaccaacgacagacuggaggccauggccagacugagaaacgaggagagcgagaagauggccaaggacaccagcgacgaggugagccugaaccccaccagcgagaagcugaacaaccugcuggagggcaacgacagcgacaacgaccugagccuggaggacuucugaggacuaguacuggcugcaucucccuuuccucuguccuccauccuucucccaggauggugaagggggaccugguacccagugauccccaccccaggauccuaaaucaugacuuaccugcuaauaaaaacucauuggaaaagugagaagaucuaaaaaaaaaaaaaaaaaaaaaaaaaaaaaaaaaaaaaaaaaaaaaaaaaaaaaaaaaaaaaaaaugcaucccccccccccccccccccccccccccccccaaaggcucuuuucagagccaccagaauu

SEQ ID NO: 20820 - RNA, 1082 nt, Artificial Sequence
  mRNA product Design f-3 comprising derived and/or modified sequence from HRSV(Memphis-37)__AIY60637.1__P (opt5)
gggagagucccgcagucggcguccagcggcucugcuuguucgugugugugucguugcaggccuuauucaagcuuaccauggagaaguucgcccccgaauuucacggcgaggacgcuaacaauagagccaccaaauuccuggaaagcaucaaggggaaauuuacauccccuaaggauccgaaaaagaaggacucuauuaucagcgugaacuccauugauaucgaggucacgaaagaaucucccauuaccagcaauuccacaaucaucaacccuaccaaugagacagacgauaccgcgggaaacaagcccaauuaccagcggaaaccucucguuucuuucaaggaggaccccacaccuagcgauaacccguuuuccaaacuguauaaggaaaccauugagacguucgacaauaacgaagaggagagcucuuacuccuaugaagagaucaaugaucaaaccaacgacaauauuacagcucgccuugauagaaucgacgaaaagcugagcgagauucucggcaugcugcauacccuugugguggccucugccgggcccacauccgcucgggauggaauccgcgacgccauggucggccugagagaagagaugauugagaaaauccggaccgaagcucucaugacgaacgaccgccuggaggccauggcgagacugcggaaugaagagagcgaaaagauggccaaagauacaucugacgaggugucccucaacccuaccagcgagaagcugaacaaucuucuggaagggaacgauuccgacaaugaucucucucuggaggacuuuugaggacuaguacuggcugcaucucccuuuccucuguccuccauccuucucccaggauggugaagggggaccugguacccagugauccccaccccaggauccuaaaucaugacuuaccugcuaauaaaaacucauuggaaaagugagaagaucuaaaaaaaaaaaaaaaaaaaaaaaaaaaaaaaaaaaaaaaaaaaaaaaaaaaaaaaaaaaaaaaaugcaucccccccccccccccccccccccccccccccaaaggcucuuuucagagccaccagaauu

SEQ ID NO: 20821 - RNA, 1082 nt, Artificial Sequence
  mRNA product Design f-3 comprising derived and/or modified sequence from HRSV(Memphis-37)__AIY60637.1__P (opt6)
gggagagucccgcagucggcguccagcggcucugcuuguucgugugugugucguugcaggccuuauucaagcuuaccauggaaaaauucgcaccagaauuccacggagaagacgcaaacaacagagcaacaaaauuccuagaaucaauaaaaggaaaauucacaagcccaaaagaucccaaaaaaaaagacucaaucauaagcguaaacucaauagauauagaaguaacaaaagaaaguccaauaacaagcaacaguacaauaauaaacccaacaaaugaaacagacgauacagcaggcaacaaaccaaacuaccaaagaaaaccgcuaguaaguuucaaagaagacccaacaccaagcgauaacccauuuucaaaauuauacaaagaaacaauagaaacauucgacaacaacgaagaagaaagcucauacucauacgaagaaauaaacgaccaaacaaacgacaacauaacagcgagauuagacagaauagacgaaaaacuaucagaaauacuaggcauguuacacacauuaguaguagcaagcgcaggaccaacaucagcaagagacggaauccgagacgcaaugguaggacuaagagaagaaaugauagaaaaaauaagaacagaagcacuaaugacaaacgacagacuagaagccauggcaagacuaagaaacgaagaaucagaaaaaauggcaaaagacacaucagacgaaguaucacuaaacccaacaagcgaaaaacuaaacaaccuauuagaaggaaacgacagcgacaacgaccuaucacucgaagacuucuaaggacuaguacuggcugcaucucccuuuccucuguccuccauccuucucccaggauggugaagggggaccugguacccagugauccccaccccaggauccuaaaucaugacuuaccugcuaauaaaaacucauuggaaaagugagaagaucuaaaaaaaaaaaaaaaaaaaaaaaaaaaaaaaaaaaaaaaaaaaaaaaaaaaaaaaaaaaaaaaaugcaucccccccccccccccccccccccccccccccaaaggcucuuuucagagccaccagaauu

SEQ ID NO: 20822 - RNA, 1082 nt, Artificial Sequence
  mRNA product Design f-3 comprising derived and/or modified sequence from HRSV(Memphis-37)__AIY60637.1__P (opt11)
gggagagucccgcagucggcguccagcggcucugcuuguucgugugugugucguugcaggccuuauucaagcuuaccauggaaaaauucgccccagaauuucacggcgaagacgccaacaaccgagccaccaaauuccucgaaucaauaaaaggcaaauucacaucccccaaagaccccaaaaaaaaagacucgaucaucuccgugaacucaaucgacauagaagucaccaaagaaagccccaucaccuccaacagcaccaucaucaaccccacaaacgaaacagacgacaccgccggcaacaaaccaaacuaccaacgaaaaccccucgucagcuucaaagaagaccccacaccaagcgacaaccccuucuccaaacucuacaaagaaacaauagaaaccuucgacaacaacgaagaagaaagcucguacucauacgaagaaaucaacgaccaaaccaacgacaacaucaccgcccgccucgaccgcaucgacgaaaaacucuccgaaauccucggaaugcuccacacacucgucgucgccagcgccggccccaccucagcccgggacggcauccgcgacgccauggugggccuccgcgaggaaaugaucgaaaaaauccgcacagaagcccucaugaccaacgaccgccucgaagccauggcccgccuccgcaacgaagaauccgaaaaaauggccaaagacaccuccgacgaagucucacuaaaccccaccuccgaaaaacuaaacaaccuccuagaaggcaacgacagcgacaacgaccucucccuagaagacuucuaaggacuaguacuggcugcaucucccuuuccucuguccuccauccuucucccaggauggugaagggggaccugguacccagugauccccaccccaggauccuaaaucaugacuuaccugcuaauaaaaacucauuggaaaagugagaagaucuaaaaaaaaaaaaaaaaaaaaaaaaaaaaaaaaaaaaaaaaaaaaaaaaaaaaaaaaaaaaaaaaugcaucccccccccccccccccccccccccccccccaaaggcucuuuucagagccaccagaauu

SEQ ID NO: 20823 - RNA, 1298 nt, Artificial Sequence
  mRNA product Design f-4 comprising derived and/or modified sequence from HRSV(Memphis-37)__AIY60637.1__P (wt)
gggagagucccgcagucggcguccagcggcucugcuuguucgugugugugucguugcaggccuuauucaagcuuaccauggaaaaguuugcuccugaauuccauggagaagacgcaaacaacagagccacuaaauuccuagaaucaauaaagggcaaauucacaucaccuaaagaucccaagaaaaaagauaguaucauaucugucaacucaauagauauagaaguaaccaaagaaagcccuauaacuucaaauucaaccauuauaaacccuacaaaugagacagaugauacugcagggaacaagcccaauuaucaaagaaaaccacuagugaguuucaaagaagacccuacgccaagugauaaucccuuuucaaaacuauacaaagaaaccauagaaacauuugauaacaaugaagaagaaucuagcuauucauaugaagaaauaaaugaucagacaaacgauaauauaacagcaagauuagauaggauugaugaaaaauuaagugaaauacuaggaaugcuucacacacuaguaguagcaagugcaggaccuacaucugcucgggaugguauaagagaugccaugguugguuuaagagaagaaaugauagaaaaaaucagaacugaagcauugaugaccaaugauagauuagaagcuauggcaagacucaggaaugaggaaagugaaaagauggcaaaagacacaucagaugaagugucucucaauccaacaucagagaaauugaacaaccuguuggaaggaaaugauagugauaaugaucuaucacuugaagauuucugaggacuagugaagggaacacccaaauuuaauucagccuuaagcacaauuaauuaagagugaaacguaauuguacaagcaguuggucacccaccauagggcaugaucaacaccgcaaccuuuccuuuuucccccagugauucugaaaaaccccucuucccuucagcuugcuuagauguuccaaauuuaguaagcuuaaggcggccuacagaagaaaaagaaaaaaaaggccacaaaaguucccucucacuuucaguaaauaaaauaaaagcagcaacagaaauaaagaaauaaaugaaauucaaaaugaaauaaauauuguguugugcagcauuaaaaaaucaauaaaaauuaaaaaugagcaagaucuaaaaaaaaaaaaaaaaaaaaaaaaaaaaaaaaaaaaaaaaaaaaaaaaaaaaaaaaaaaaaaaaugcaucccccccccccccccccccccccccccccccaaaggcucuuuucagagccaccagaauu

SEQ ID NO: 20824 - RNA, 1298 nt, Artificial Sequence
  mRNA product Design f-4 comprising derived and/or modified sequence from HRSV(Memphis-37)__AIY60637.1__P (opt1)
gggagagucccgcagucggcguccagcggcucugcuuguucgugugugugucguugcaggccuuauucaagcuuaccauggagaaguucgcccccgaguuccacggcgaggacgccaacaaccgcgcgaccaaguuccuggagagcaucaaggggaaguucaccuccccgaaggaccccaagaagaaggacagcaucaucuccgugaacagcaucgacaucgaggucacgaaggagucccccaucaccagcaacuccaccaucaucaaccccaccaacgagacggacgacaccgccggcaacaagccgaacuaccagcggaagccccucgugagcuucaaggaggaccccacccccuccgacaacccguucagcaagcuguacaaggagaccaucgagacguucgacaacaacgaggaggaguccagcuacuccuacgaggagaucaacgaccagaccaacgacaacaucaccgcccgccuggaccggaucgacgagaagcucagcgagauccuggggaugcugcacacccucguggucgccuccgccggccccacgagcgcgcgcgacgggauccgggacgccauggugggccugcgcgaggagaugaucgagaagauccggaccgaggcccugaugaccaacgaccgccucgaggccauggcgcggcugcgcaacgaggaguccgagaagauggccaaggacaccagcgacgaggugucccugaaccccacgagcgagaagcucaacaaccugcuggagggcaacgacagcgacaacgaccucucccuggaggacuucugaggacuagugaagggaacacccaaauuuaauucagccuuaagcacaauuaauuaagagugaaacguaauuguacaagcaguuggucacccaccauagggcaugaucaacaccgcaaccuuuccuuuuucccccagugauucugaaaaaccccucuucccuucagcuugcuuagauguuccaaauuuaguaagcuuaaggcggccuacagaagaaaaagaaaaaaaaggccacaaaaguucccucucacuuucaguaaauaaaauaaaagcagcaacagaaauaaagaaauaaaugaaauucaaaaugaaauaaauauuguguugugcagcauuaaaaaaucaauaaaaauuaaaaaugagcaagaucuaaaaaaaaaaaaaaaaaaaaaaaaaaaaaaaaaaaaaaaaaaaaaaaaaaaaaaaaaaaaaaaaugcaucccccccccccccccccccccccccccccccaaaggcucuuuucagagccaccagaauu

SEQ ID NO: 20825 - RNA, 1298 nt, Artificial Sequence
  mRNA product Design f-4 comprising derived and/or modified sequence from HRSV(Memphis-37)__AIY60637.1__P (opt2)
gggagagucccgcagucggcguccagcggcucugcuuguucgugugugugucguugcaggccuuauucaagcuuaccauggagaaguucgcccccgaguuccacggcgaggacgccaacaaccgcgccaccaaguuccucgaguccaucaagggcaaguucaccucccccaaggaccccaagaagaaggacuccaucaucuccgucaacuccaucgacaucgaggucaccaaggagucccccaucaccuccaacuccaccaucaucaaccccaccaacgagaccgacgacaccgccggcaacaagcccaacuaccagcgcaagccccucgucuccuucaaggaggaccccacccccuccgacaaccccuucuccaagcucuacaaggagaccaucgagaccuucgacaacaacgaggaggaguccuccuacuccuacgaggagaucaacgaccagaccaacgacaacaucaccgcccgccucgaccgcaucgacgagaagcucuccgagauccucggcaugcuccacacccucgucgucgccuccgccggccccaccuccgcccgcgacggcauccgcgacgccauggucggccuccgcgaggagaugaucgagaagauccgcaccgaggcccucaugaccaacgaccgccucgaggccauggcccgccuccgcaacgaggaguccgagaagauggccaaggacaccuccgacgaggucucccucaaccccaccuccgagaagcucaacaaccuccucgagggcaacgacuccgacaacgaccucucccucgaggacuucugaggacuagugaagggaacacccaaauuuaauucagccuuaagcacaauuaauuaagagugaaacguaauuguacaagcaguuggucacccaccauagggcaugaucaacaccgcaaccuuuccuuuuucccccagugauucugaaaaaccccucuucccuucagcuugcuuagauguuccaaauuuaguaagcuuaaggcggccuacagaagaaaaagaaaaaaaaggccacaaaaguucccucucacuuucaguaaauaaaauaaaagcagcaacagaaauaaagaaauaaaugaaauucaaaaugaaauaaauauuguguugugcagcauuaaaaaaucaauaaaaauuaaaaaugagcaagaucuaaaaaaaaaaaaaaaaaaaaaaaaaaaaaaaaaaaaaaaaaaaaaaaaaaaaaaaaaaaaaaaaugcaucccccccccccccccccccccccccccccccaaaggcucuuuucagagccaccagaauu

SEQ ID NO: 20826 - RNA, 1298 nt, Artificial Sequence
  mRNA product Design f-4 comprising derived and/or modified sequence from HRSV(Memphis-37)__AIY60637.1__P (opt3)
gggagagucccgcagucggcguccagcggcucugcuuguucgugugugugucguugcaggccuuauucaagcuuaccauggagaaguucgcccccgaauuucacggcgaggacgcuaacaauagagcaaccaaauuccuggaaagcaucaaggggaaauuuacauccccuaaggauccgaaaaagaaggacucuauuauaucagugaacaguaucgauauugaggucacuaaagaaagcccaaucacguccaauucuaccauuaucaaccccacaaaugagacugacgauaccgccggaaacaagccuaauuaccagaggaaaccacucguuucguucaaggaggaccccacaccuucagauaacccauuuagcaaacuuuauaaggaaaccauagagacuuucgacaauaacgaagaggagaguuccuacucuuaugaagagaucaaugaucaaacaaacgacaauauuaccgcgcggcuggaucgcaucgacgaaaaguugagcgagauuuuagguaugcugcauacgcuagugguagcuuccgccggccccacuucagcacgagaugggauccgugacgccauggugggacucagagaagagaugauagagaaaauuaggaccgaagcucugaugacaaacgaccggcuugaggcaauggcccgccugagaaaugaagagagugaaaagauggcuaaagauacuagcgacgaggucucuuugaacccuaccuccgagaagcucaacaaucugcuggaaggcaacgauucagacaaugaucucagcuuagaggacuuuugaggacuagugaagggaacacccaaauuuaauucagccuuaagcacaauuaauuaagagugaaacguaauuguacaagcaguuggucacccaccauagggcaugaucaacaccgcaaccuuuccuuuuucccccagugauucugaaaaaccccucuucccuucagcuugcuuagauguuccaaauuuaguaagcuuaaggcggccuacagaagaaaaagaaaaaaaaggccacaaaaguucccucucacuuucaguaaauaaaauaaaagcagcaacagaaauaaagaaauaaaugaaauucaaaaugaaauaaauauuguguugugcagcauuaaaaaaucaauaaaaauuaaaaaugagcaagaucuaaaaaaaaaaaaaaaaaaaaaaaaaaaaaaaaaaaaaaaaaaaaaaaaaaaaaaaaaaaaaaaaugcaucccccccccccccccccccccccccccccccaaaggcucuuuucagagccaccagaauu

SEQ ID NO: 20827 - RNA, 1298 nt, Artificial Sequence
  mRNA product Design f-4 comprising derived and/or modified sequence from HRSV(Memphis-37)__AIY60637.1__P (opt4)
gggagagucccgcagucggcguccagcggcucugcuuguucgugugugugucguugcaggccuuauucaagcuuaccauggagaaguucgcccccgaguuccacggcgaggacgccaacaacagagccaccaaguuccuggagagcaucaagggcaaguucaccagccccaaggaccccaagaagaaggacagcaucaucagcgugaacagcaucgacaucgaggugaccaaggagagccccaucaccagcaacagcaccaucaucaaccccaccaacgagaccgacgacaccgccggcaacaagcccaacuaccagagaaagccccuggugagcuucaaggaggaccccacccccagcgacaaccccuucagcaagcuguacaaggagaccaucgagaccuucgacaacaacgaggaggagagcagcuacagcuacgaggagaucaacgaccagaccaacgacaacaucaccgccagacuggacagaaucgacgagaagcugagcgagauccugggcaugcugcacacccuggugguggccagcgccggccccaccagcgccagagacggcaucagagacgccauggugggccugagagaggagaugaucgagaagaucagaaccgaggcccugaugaccaacgacagacuggaggccauggccagacugagaaacgaggagagcgagaagauggccaaggacaccagcgacgaggugagccugaaccccaccagcgagaagcugaacaaccugcuggagggcaacgacagcgacaacgaccugagccuggaggacuucugaggacuagugaagggaacacccaaauuuaauucagccuuaagcacaauuaauuaagagugaaacguaauuguacaagcaguuggucacccaccauagggcaugaucaacaccgcaaccuuuccuuuuucccccagugauucugaaaaaccccucuucccuucagcuugcuuagauguuccaaauuuaguaagcuuaaggcggccuacagaagaaaaagaaaaaaaaggccacaaaaguucccucucacuuucaguaaauaaaauaaaagcagcaacagaaauaaagaaauaaaugaaauucaaaaugaaauaaauauuguguugugcagcauuaaaaaaucaauaaaaauuaaaaaugagcaagaucuaaaaaaaaaaaaaaaaaaaaaaaaaaaaaaaaaaaaaaaaaaaaaaaaaaaaaaaaaaaaaaaaugcaucccccccccccccccccccccccccccccccaaaggcucuuuucagagccaccagaauu

SEQ ID NO: 20828 - RNA, 1298 nt, Artificial Sequence
  mRNA product Design f-4 comprising derived and/or modified sequence from HRSV(Memphis-37)__AIY60637.1__P (opt5)
gggagagucccgcagucggcguccagcggcucugcuuguucgugugugugucguugcaggccuuauucaagcuuaccauggagaaguucgcccccgaauuucacggcgaggacgcuaacaauagagccaccaaauuccuggaaagcaucaaggggaaauuuacauccccuaaggauccgaaaaagaaggacucuauuaucagcgugaacuccauugauaucgaggucacgaaagaaucucccauuaccagcaauuccacaaucaucaacccuaccaaugagacagacgauaccgcgggaaacaagcccaauuaccagcggaaaccucucguuucuuucaaggaggaccccacaccuagcgauaacccguuuuccaaacuguauaaggaaaccauugagacguucgacaauaacgaagaggagagcucuuacuccuaugaagagaucaaugaucaaaccaacgacaauauuacagcucgccuugauagaaucgacgaaaagcugagcgagauucucggcaugcugcauacccuugugguggccucugccgggcccacauccgcucgggauggaauccgcgacgccauggucggccugagagaagagaugauugagaaaauccggaccgaagcucucaugacgaacgaccgccuggaggccauggcgagacugcggaaugaagagagcgaaaagauggccaaagauacaucugacgaggugucccucaacccuaccagcgagaagcugaacaaucuucuggaagggaacgauuccgacaaugaucucucucuggaggacuuuugaggacuagugaagggaacacccaaauuuaauucagccuuaagcacaauuaauuaagagugaaacguaauuguacaagcaguuggucacccaccauagggcaugaucaacaccgcaaccuuuccuuuuucccccagugauucugaaaaaccccucuucccuucagcuugcuuagauguuccaaauuuaguaagcuuaaggcggccuacagaagaaaaagaaaaaaaaggccacaaaaguucccucucacuuucaguaaauaaaauaaaagcagcaacagaaauaaagaaauaaaugaaauucaaaaugaaauaaauauuguguugugcagcauuaaaaaaucaauaaaaauuaaaaaugagcaagaucuaaaaaaaaaaaaaaaaaaaaaaaaaaaaaaaaaaaaaaaaaaaaaaaaaaaaaaaaaaaaaaaaugcaucccccccccccccccccccccccccccccccaaaggcucuuuucagagccaccagaauu

SEQ ID NO: 20829 - RNA, 1298 nt, Artificial Sequence
  mRNA product Design f-4 comprising derived and/or modified sequence from HRSV(Memphis-37)__AIY60637.1__P (opt6)
gggagagucccgcagucggcguccagcggcucugcuuguucgugugugugucguugcaggccuuauucaagcuuaccauggaaaaauucgcaccagaauuccacggagaagacgcaaacaacagagcaacaaaauuccuagaaucaauaaaaggaaaauucacaagcccaaaagaucccaaaaaaaaagacucaaucauaagcguaaacucaauagauauagaaguaacaaaagaaaguccaauaacaagcaacaguacaauaauaaacccaacaaaugaaacagacgauacagcaggcaacaaaccaaacuaccaaagaaaaccgcuaguaaguuucaaagaagacccaacaccaagcgauaacccauuuucaaaauuauacaaagaaacaauagaaacauucgacaacaacgaagaagaaagcucauacucauacgaagaaauaaacgaccaaacaaacgacaacauaacagcgagauuagacagaauagacgaaaaacuaucagaaauacuaggcauguuacacacauuaguaguagcaagcgcaggaccaacaucagcaagagacggaauccgagacgcaaugguaggacuaagagaagaaaugauagaaaaaauaagaacagaagcacuaaugacaaacgacagacuagaagccauggcaagacuaagaaacgaagaaucagaaaaaauggcaaaagacacaucagacgaaguaucacuaaacccaacaagcgaaaaacuaaacaaccuauuagaaggaaacgacagcgacaacgaccuaucacucgaagacuucuaaggacuagugaagggaacacccaaauuuaauucagccuuaagcacaauuaauuaagagugaaacguaauuguacaagcaguuggucacccaccauagggcaugaucaacaccgcaaccuuuccuuuuucccccagugauucugaaaaaccccucuucccuucagcuugcuuagauguuccaaauuuaguaagcuuaaggcggccuacagaagaaaaagaaaaaaaaggccacaaaaguucccucucacuuucaguaaauaaaauaaaagcagcaacagaaauaaagaaauaaaugaaauucaaaaugaaauaaauauuguguugugcagcauuaaaaaaucaauaaaaauuaaaaaugagcaagaucuaaaaaaaaaaaaaaaaaaaaaaaaaaaaaaaaaaaaaaaaaaaaaaaaaaaaaaaaaaaaaaaaugcaucccccccccccccccccccccccccccccccaaaggcucuuuucagagccaccagaauu

SEQ ID NO: 20830 - RNA, 1298 nt, Artificial Sequence
  mRNA product Design f-4 comprising derived and/or modified sequence from HRSV(Memphis-37)__AIY60637.1__P (opt11)
gggagagucccgcagucggcguccagcggcucugcuuguucgugugugugucguugcaggccuuauucaagcuuaccauggaaaaauucgccccagaauuucacggcgaagacgccaacaaccgagccaccaaauuccucgaaucaauaaaaggcaaauucacaucccccaaagaccccaaaaaaaaagacucgaucaucuccgugaacucaaucgacauagaagucaccaaagaaagccccaucaccuccaacagcaccaucaucaaccccacaaacgaaacagacgacaccgccggcaacaaaccaaacuaccaacgaaaaccccucgucagcuucaaagaagaccccacaccaagcgacaaccccuucuccaaacucuacaaagaaacaauagaaaccuucgacaacaacgaagaagaaagcucguacucauacgaagaaaucaacgaccaaaccaacgacaacaucaccgcccgccucgaccgcaucgacgaaaaacucuccgaaauccucggaaugcuccacacacucgucgucgccagcgccggccccaccucagcccgggacggcauccgcgacgccauggugggccuccgcgaggaaaugaucgaaaaaauccgcacagaagcccucaugaccaacgaccgccucgaagccauggcccgccuccgcaacgaagaauccgaaaaaauggccaaagacaccuccgacgaagucucacuaaaccccaccuccgaaaaacuaaacaaccuccuagaaggcaacgacagcgacaacgaccucucccuagaagacuucuaaggacuagugaagggaacacccaaauuuaauucagccuuaagcacaauuaauuaagagugaaacguaauuguacaagcaguuggucacccaccauagggcaugaucaacaccgcaaccuuuccuuuuucccccagugauucugaaaaaccccucuucccuucagcuugcuuagauguuccaaauuuaguaagcuuaaggcggccuacagaagaaaaagaaaaaaaaggccacaaaaguucccucucacuuucaguaaauaaaauaaaagcagcaacagaaauaaagaaauaaaugaaauucaaaaugaaauaaauauuguguugugcagcauuaaaaaaucaauaaaaauuaaaaaugagcaagaucuaaaaaaaaaaaaaaaaaaaaaaaaaaaaaaaaaaaaaaaaaaaaaaaaaaaaaaaaaaaaaaaaugcaucccccccccccccccccccccccccccccccaaaggcucuuuucagagccaccagaauu

SEQ ID NO: 20831 - RNA, 1074 nt, Artificial Sequence
  mRNA product Design f-5 comprising derived and/or modified sequence from HRSV(Memphis-37)__AIY60637.1__P (wt)
gggagacuuucccauucuguagcagaauuugguguugccuguggucuuggucccgcggagaagcuuaccauggaaaaguuugcuccugaauuccauggagaagacgcaaacaacagagccacuaaauuccuagaaucaauaaagggcaaauucacaucaccuaaagaucccaagaaaaaagauaguaucauaucugucaacucaauagauauagaaguaaccaaagaaagcccuauaacuucaaauucaaccauuauaaacccuacaaaugagacagaugauacugcagggaacaagcccaauuaucaaagaaaaccacuagugaguuucaaagaagacccuacgccaagugauaaucccuuuucaaaacuauacaaagaaaccauagaaacauuugauaacaaugaagaagaaucuagcuauucauaugaagaaauaaaugaucagacaaacgauaauauaacagcaagauuagauaggauugaugaaaaauuaagugaaauacuaggaaugcuucacacacuaguaguagcaagugcaggaccuacaucugcucgggaugguauaagagaugccaugguugguuuaagagaagaaaugauagaaaaaaucagaacugaagcauugaugaccaaugauagauuagaagcuauggcaagacucaggaaugaggaaagugaaaagauggcaaaagacacaucagaugaagugucucucaauccaacaucagagaaauugaacaaccuguuggaaggaaaugauagugauaaugaucuaucacuugaagauuucugaggacuaguacuggcugcaucucccuuuccucuguccuccauccuucucccaggauggugaagggggaccugguacccagugauccccaccccaggauccuaaaucaugacuuaccugcuaauaaaaacucauuggaaaagugagaagaucuaaaaaaaaaaaaaaaaaaaaaaaaaaaaaaaaaaaaaaaaaaaaaaaaaaaaaaaaaaaaaaaaugcaucccccccccccccccccccccccccccccccaaaggcucuuuucagagccaccagaauu

SEQ ID NO: 20832 - RNA, 1074 nt, Artificial Sequence
  mRNA product Design f-5 comprising derived and/or modified sequence from HRSV(Memphis-37)__AIY60637.1__P (opt1)
gggagacuuucccauucuguagcagaauuugguguugccuguggucuuggucccgcggagaagcuuaccauggagaaguucgcccccgaguuccacggcgaggacgccaacaaccgcgcgaccaaguuccuggagagcaucaaggggaaguucaccuccccgaaggaccccaagaagaaggacagcaucaucuccgugaacagcaucgacaucgaggucacgaaggagucccccaucaccagcaacuccaccaucaucaaccccaccaacgagacggacgacaccgccggcaacaagccgaacuaccagcggaagccccucgugagcuucaaggaggaccccacccccuccgacaacccguucagcaagcuguacaaggagaccaucgagacguucgacaacaacgaggaggaguccagcuacuccuacgaggagaucaacgaccagaccaacgacaacaucaccgcccgccuggaccggaucgacgagaagcucagcgagauccuggggaugcugcacacccucguggucgccuccgccggccccacgagcgcgcgcgacgggauccgggacgccauggugggccugcgcgaggagaugaucgagaagauccggaccgaggcccugaugaccaacgaccgccucgaggccauggcgcggcugcgcaacgaggaguccgagaagauggccaaggacaccagcgacgaggugucccugaaccccacgagcgagaagcucaacaaccugcuggagggcaacgacagcgacaacgaccucucccuggaggacuucugaggacuaguacuggcugcaucucccuuuccucuguccuccauccuucucccaggauggugaagggggaccugguacccagugauccccaccccaggauccuaaaucaugacuuaccugcuaauaaaaacucauuggaaaagugagaagaucuaaaaaaaaaaaaaaaaaaaaaaaaaaaaaaaaaaaaaaaaaaaaaaaaaaaaaaaaaaaaaaaaugcaucccccccccccccccccccccccccccccccaaaggcucuuuucagagccaccagaauu

SEQ ID NO: 20833 - RNA, 1074 nt, Artificial Sequence
  mRNA product Design f-5 comprising derived and/or modified sequence from HRSV(Memphis-37)__AIY60637.1__P (opt2)
gggagacuuucccauucuguagcagaauuugguguugccuguggucuuggucccgcggagaagcuuaccauggagaaguucgcccccgaguuccacggcgaggacgccaacaaccgcgccaccaaguuccucgaguccaucaagggcaaguucaccucccccaaggaccccaagaagaaggacuccaucaucuccgucaacuccaucgacaucgaggucaccaaggagucccccaucaccuccaacuccaccaucaucaaccccaccaacgagaccgacgacaccgccggcaacaagcccaacuaccagcgcaagccccucgucuccuucaaggaggaccccacccccuccgacaaccccuucuccaagcucuacaaggagaccaucgagaccuucgacaacaacgaggaggaguccuccuacuccuacgaggagaucaacgaccagaccaacgacaacaucaccgcccgccucgaccgcaucgacgagaagcucuccgagauccucggcaugcuccacacccucgucgucgccuccgccggccccaccuccgcccgcgacggcauccgcgacgccauggucggccuccgcgaggagaugaucgagaagauccgcaccgaggcccucaugaccaacgaccgccucgaggccauggcccgccuccgcaacgaggaguccgagaagauggccaaggacaccuccgacgaggucucccucaaccccaccuccgagaagcucaacaaccuccucgagggcaacgacuccgacaacgaccucucccucgaggacuucugaggacuaguacuggcugcaucucccuuuccucuguccuccauccuucucccaggauggugaagggggaccugguacccagugauccccaccccaggauccuaaaucaugacuuaccugcuaauaaaaacucauuggaaaagugagaagaucuaaaaaaaaaaaaaaaaaaaaaaaaaaaaaaaaaaaaaaaaaaaaaaaaaaaaaaaaaaaaaaaaugcaucccccccccccccccccccccccccccccccaaaggcucuuuucagagccaccagaauu

SEQ ID NO: 20834 - RNA, 1074 nt, Artificial Sequence
  mRNA product Design f-5 comprising derived and/or modified sequence from HRSV(Memphis-37)__AIY60637.1__P (opt3)
gggagacuuucccauucuguagcagaauuugguguugccuguggucuuggucccgcggagaagcuuaccauggagaaguucgcccccgaauuucacggcgaggacgcuaacaauagagcaaccaaauuccuggaaagcaucaaggggaaauuuacauccccuaaggauccgaaaaagaaggacucuauuauaucagugaacaguaucgauauugaggucacuaaagaaagcccaaucacguccaauucuaccauuaucaaccccacaaaugagacugacgauaccgccggaaacaagccuaauuaccagaggaaaccacucguuucguucaaggaggaccccacaccuucagauaacccauuuagcaaacuuuauaaggaaaccauagagacuuucgacaauaacgaagaggagaguuccuacucuuaugaagagaucaaugaucaaacaaacgacaauauuaccgcgcggcuggaucgcaucgacgaaaaguugagcgagauuuuagguaugcugcauacgcuagugguagcuuccgccggccccacuucagcacgagaugggauccgugacgccauggugggacucagagaagagaugauagagaaaauuaggaccgaagcucugaugacaaacgaccggcuugaggcaauggcccgccugagaaaugaagagagugaaaagauggcuaaagauacuagcgacgaggucucuuugaacccuaccuccgagaagcucaacaaucugcuggaaggcaacgauucagacaaugaucucagcuuagaggacuuuugaggacuaguacuggcugcaucucccuuuccucuguccuccauccuucucccaggauggugaagggggaccugguacccagugauccccaccccaggauccuaaaucaugacuuaccugcuaauaaaaacucauuggaaaagugagaagaucuaaaaaaaaaaaaaaaaaaaaaaaaaaaaaaaaaaaaaaaaaaaaaaaaaaaaaaaaaaaaaaaaugcaucccccccccccccccccccccccccccccccaaaggcucuuuucagagccaccagaauu

SEQ ID NO: 20835 - RNA, 1074 nt, Artificial Sequence
  mRNA product Design f-5 comprising derived and/or modified sequence from HRSV(Memphis-37)__AIY60637.1__P (opt4)
gggagacuuucccauucuguagcagaauuugguguugccuguggucuuggucccgcggagaagcuuaccauggagaaguucgcccccgaguuccacggcgaggacgccaacaacagagccaccaaguuccuggagagcaucaagggcaaguucaccagccccaaggaccccaagaagaaggacagcaucaucagcgugaacagcaucgacaucgaggugaccaaggagagccccaucaccagcaacagcaccaucaucaaccccaccaacgagaccgacgacaccgccggcaacaagcccaacuaccagagaaagccccuggugagcuucaaggaggaccccacccccagcgacaaccccuucagcaagcuguacaaggagaccaucgagaccuucgacaacaacgaggaggagagcagcuacagcuacgaggagaucaacgaccagaccaacgacaacaucaccgccagacuggacagaaucgacgagaagcugagcgagauccugggcaugcugcacacccuggugguggccagcgccggccccaccagcgccagagacggcaucagagacgccauggugggccugagagaggagaugaucgagaagaucagaaccgaggcccugaugaccaacgacagacuggaggccauggccagacugagaaacgaggagagcgagaagauggccaaggacaccagcgacgaggugagccugaaccccaccagcgagaagcugaacaaccugcuggagggcaacgacagcgacaacgaccugagccuggaggacuucugaggacuaguacuggcugcaucucccuuuccucuguccuccauccuucucccaggauggugaagggggaccugguacccagugauccccaccccaggauccuaaaucaugacuuaccugcuaauaaaaacucauuggaaaagugagaagaucuaaaaaaaaaaaaaaaaaaaaaaaaaaaaaaaaaaaaaaaaaaaaaaaaaaaaaaaaaaaaaaaaugcaucccccccccccccccccccccccccccccccaaaggcucuuuucagagccaccagaauu

SEQ ID NO: 20836 - RNA, 1074 nt, Artificial Sequence
  mRNA product Design f-5 comprising derived and/or modified sequence from HRSV(Memphis-37)__AIY60637.1__P (opt5)
gggagacuuucccauucuguagcagaauuugguguugccuguggucuuggucccgcggagaagcuuaccauggagaaguucgcccccgaauuucacggcgaggacgcuaacaauagagccaccaaauuccuggaaagcaucaaggggaaauuuacauccccuaaggauccgaaaaagaaggacucuauuaucagcgugaacuccauugauaucgaggucacgaaagaaucucccauuaccagcaauuccacaaucaucaacccuaccaaugagacagacgauaccgcgggaaacaagcccaauuaccagcggaaaccucucguuucuuucaaggaggaccccacaccuagcgauaacccguuuuccaaacuguauaaggaaaccauugagacguucgacaauaacgaagaggagagcucuuacuccuaugaagagaucaaugaucaaaccaacgacaauauuacagcucgccuugauagaaucgacgaaaagcugagcgagauucucggcaugcugcauacccuugugguggccucugccgggcccacauccgcucgggauggaauccgcgacgccauggucggccugagagaagagaugauugagaaaauccggaccgaagcucucaugacgaacgaccgccuggaggccauggcgagacugcggaaugaagagagcgaaaagauggccaaagauacaucugacgaggugucccucaacccuaccagcgagaagcugaacaaucuucuggaagggaacgauuccgacaaugaucucucucuggaggacuuuugaggacuaguacuggcugcaucucccuuuccucuguccuccauccuucucccaggauggugaagggggaccugguacccagugauccccaccccaggauccuaaaucaugacuuaccugcuaauaaaaacucauuggaaaagugagaagaucuaaaaaaaaaaaaaaaaaaaaaaaaaaaaaaaaaaaaaaaaaaaaaaaaaaaaaaaaaaaaaaaaugcaucccccccccccccccccccccccccccccccaaaggcucuuuucagagccaccagaauu

SEQ ID NO: 20837 - RNA, 1074 nt, Artificial Sequence
  mRNA product Design f-5 comprising derived and/or modified sequence from HRSV(Memphis-37)__AIY60637.1__P (opt6)
gggagacuuucccauucuguagcagaauuugguguugccuguggucuuggucccgcggagaagcuuaccauggaaaaauucgcaccagaauuccacggagaagacgcaaacaacagagcaacaaaauuccuagaaucaauaaaaggaaaauucacaagcccaaaagaucccaaaaaaaaagacucaaucauaagcguaaacucaauagauauagaaguaacaaaagaaaguccaauaacaagcaacaguacaauaauaaacccaacaaaugaaacagacgauacagcaggcaacaaaccaaacuaccaaagaaaaccgcuaguaaguuucaaagaagacccaacaccaagcgauaacccauuuucaaaauuauacaaagaaacaauagaaacauucgacaacaacgaagaagaaagcucauacucauacgaagaaauaaacgaccaaacaaacgacaacauaacagcgagauuagacagaauagacgaaaaacuaucagaaauacuaggcauguuacacacauuaguaguagcaagcgcaggaccaacaucagcaagagacggaauccgagacgcaaugguaggacuaagagaagaaaugauagaaaaaauaagaacagaagcacuaaugacaaacgacagacuagaagccauggcaagacuaagaaacgaagaaucagaaaaaauggcaaaagacacaucagacgaaguaucacuaaacccaacaagcgaaaaacuaaacaaccuauuagaaggaaacgacagcgacaacgaccuaucacucgaagacuucuaaggacuaguacuggcugcaucucccuuuccucuguccuccauccuucucccaggauggugaagggggaccugguacccagugauccccaccccaggauccuaaaucaugacuuaccugcuaauaaaaacucauuggaaaagugagaagaucuaaaaaaaaaaaaaaaaaaaaaaaaaaaaaaaaaaaaaaaaaaaaaaaaaaaaaaaaaaaaaaaaugcaucccccccccccccccccccccccccccccccaaaggcucuuuucagagccaccagaauu

SEQ ID NO: 20838 - RNA, 1074 nt, Artificial Sequence
  mRNA product Design f-5 comprising derived and/or modified sequence from HRSV(Memphis-37)__AIY60637.1__P (opt11)
gggagacuuucccauucuguagcagaauuugguguugccuguggucuuggucccgcggagaagcuuaccauggaaaaauucgccccagaauuucacggcgaagacgccaacaaccgagccaccaaauuccucgaaucaauaaaaggcaaauucacaucccccaaagaccccaaaaaaaaagacucgaucaucuccgugaacucaaucgacauagaagucaccaaagaaagccccaucaccuccaacagcaccaucaucaaccccacaaacgaaacagacgacaccgccggcaacaaaccaaacuaccaacgaaaaccccucgucagcuucaaagaagaccccacaccaagcgacaaccccuucuccaaacucuacaaagaaacaauagaaaccuucgacaacaacgaagaagaaagcucguacucauacgaagaaaucaacgaccaaaccaacgacaacaucaccgcccgccucgaccgcaucgacgaaaaacucuccgaaauccucggaaugcuccacacacucgucgucgccagcgccggccccaccucagcccgggacggcauccgcgacgccauggugggccuccgcgaggaaaugaucgaaaaaauccgcacagaagcccucaugaccaacgaccgccucgaagccauggcccgccuccgcaacgaagaauccgaaaaaauggccaaagacaccuccgacgaagucucacuaaaccccaccuccgaaaaacuaaacaaccuccuagaaggcaacgacagcgacaacgaccucucccuagaagacuucuaaggacuaguacuggcugcaucucccuuuccucuguccuccauccuucucccaggauggugaagggggaccugguacccagugauccccaccccaggauccuaaaucaugacuuaccugcuaauaaaaacucauuggaaaagugagaagaucuaaaaaaaaaaaaaaaaaaaaaaaaaaaaaaaaaaaaaaaaaaaaaaaaaaaaaaaaaaaaaaaaugcaucccccccccccccccccccccccccccccccaaaggcucuuuucagagccaccagaauu

SEQ ID NO: 20839 - RNA, 1070 nt, Artificial Sequence
  mRNA product Design g-1 comprising derived and/or modified sequence from HRSV(Memphis-37)__AIY60637.1__P (wt)
gggagacuuucccauucuguagcagaauuugguguugccuguggucuuggucccgcggagaagcuuaccauggaaaaguuugcuccugaauuccauggagaagacgcaaacaacagagccacuaaauuccuagaaucaauaaagggcaaauucacaucaccuaaagaucccaagaaaaaagauaguaucauaucugucaacucaauagauauagaaguaaccaaagaaagcccuauaacuucaaauucaaccauuauaaacccuacaaaugagacagaugauacugcagggaacaagcccaauuaucaaagaaaaccacuagugaguuucaaagaagacccuacgccaagugauaaucccuuuucaaaacuauacaaagaaaccauagaaacauuugauaacaaugaagaagaaucuagcuauucauaugaagaaauaaaugaucagacaaacgauaauauaacagcaagauuagauaggauugaugaaaaauuaagugaaauacuaggaaugcuucacacacuaguaguagcaagugcaggaccuacaucugcucgggaugguauaagagaugccaugguugguuuaagagaagaaaugauagaaaaaaucagaacugaagcauugaugaccaaugauagauuagaagcuauggcaagacucaggaaugaggaaagugaaaagauggcaaaagacacaucagaugaagugucucucaauccaacaucagagaaauugaacaaccuguuggaaggaaaugauagugauaaugaucuaucacuugaagauuucugaggacuaguggaagcauuuuccuggcugauuaaaagaaauuacucagcuauggucaucuguuccuguuagaaggcuaugcagcauauuauauacuaugcgcauguuaugaaaugcauaauaaaaaauuuuaaaaaaucuaaaagaucuaaaaaaaaaaaaaaaaaaaaaaaaaaaaaaaaaaaaaaaaaaaaaaaaaaaaaaaaaaaaaaaaugcaucccccccccccccccccccccccccccccccaaaggcucuuuucagagccaccagaauu

SEQ ID NO: 20840 - RNA, 1070 nt, Artificial Sequence
  mRNA product Design g-1 comprising derived and/or modified sequence from HRSV(Memphis-37)__AIY60637.1__P (opt1)
gggagacuuucccauucuguagcagaauuugguguugccuguggucuuggucccgcggagaagcuuaccauggagaaguucgcccccgaguuccacggcgaggacgccaacaaccgcgcgaccaaguuccuggagagcaucaaggggaaguucaccuccccgaaggaccccaagaagaaggacagcaucaucuccgugaacagcaucgacaucgaggucacgaaggagucccccaucaccagcaacuccaccaucaucaaccccaccaacgagacggacgacaccgccggcaacaagccgaacuaccagcggaagccccucgugagcuucaaggaggaccccacccccuccgacaacccguucagcaagcuguacaaggagaccaucgagacguucgacaacaacgaggaggaguccagcuacuccuacgaggagaucaacgaccagaccaacgacaacaucaccgcccgccuggaccggaucgacgagaagcucagcgagauccuggggaugcugcacacccucguggucgccuccgccggccccacgagcgcgcgcgacgggauccgggacgccauggugggccugcgcgaggagaugaucgagaagauccggaccgaggcccugaugaccaacgaccgccucgaggccauggcgcggcugcgcaacgaggaguccgagaagauggccaaggacaccagcgacgaggugucccugaaccccacgagcgagaagcucaacaaccugcuggagggcaacgacagcgacaacgaccucucccuggaggacuucugaggacuaguggaagcauuuuccuggcugauuaaaagaaauuacucagcuauggucaucuguuccuguuagaaggcuaugcagcauauuauauacuaugcgcauguuaugaaaugcauaauaaaaaauuuuaaaaaaucuaaaagaucuaaaaaaaaaaaaaaaaaaaaaaaaaaaaaaaaaaaaaaaaaaaaaaaaaaaaaaaaaaaaaaaaugcaucccccccccccccccccccccccccccccccaaaggcucuuuucagagccaccagaauu

SEQ ID NO: 20841 - RNA, 1070 nt, Artificial Sequence
  mRNA product Design g-1 comprising derived and/or modified sequence from HRSV(Memphis-37)__AIY60637.1__P (opt2)
gggagacuuucccauucuguagcagaauuugguguugccuguggucuuggucccgcggagaagcuuaccauggagaaguucgcccccgaguuccacggcgaggacgccaacaaccgcgccaccaaguuccucgaguccaucaagggcaaguucaccucccccaaggaccccaagaagaaggacuccaucaucuccgucaacuccaucgacaucgaggucaccaaggagucccccaucaccuccaacuccaccaucaucaaccccaccaacgagaccgacgacaccgccggcaacaagcccaacuaccagcgcaagccccucgucuccuucaaggaggaccccacccccuccgacaaccccuucuccaagcucuacaaggagaccaucgagaccuucgacaacaacgaggaggaguccuccuacuccuacgaggagaucaacgaccagaccaacgacaacaucaccgcccgccucgaccgcaucgacgagaagcucuccgagauccucggcaugcuccacacccucgucgucgccuccgccggccccaccuccgcccgcgacggcauccgcgacgccauggucggccuccgcgaggagaugaucgagaagauccgcaccgaggcccucaugaccaacgaccgccucgaggccauggcccgccuccgcaacgaggaguccgagaagauggccaaggacaccuccgacgaggucucccucaaccccaccuccgagaagcucaacaaccuccucgagggcaacgacuccgacaacgaccucucccucgaggacuucugaggacuaguggaagcauuuuccuggcugauuaaaagaaauuacucagcuauggucaucuguuccuguuagaaggcuaugcagcauauuauauacuaugcgcauguuaugaaaugcauaauaaaaaauuuuaaaaaaucuaaaagaucuaaaaaaaaaaaaaaaaaaaaaaaaaaaaaaaaaaaaaaaaaaaaaaaaaaaaaaaaaaaaaaaaugcaucccccccccccccccccccccccccccccccaaaggcucuuuucagagccaccagaauu

SEQ ID NO: 20842 - RNA, 1070 nt, Artificial Sequence
  mRNA product Design g-1 comprising derived and/or modified sequence from HRSV(Memphis-37)__AIY60637.1__P (opt3)
gggagacuuucccauucuguagcagaauuugguguugccuguggucuuggucccgcggagaagcuuaccauggagaaguucgcccccgaauuucacggcgaggacgcuaacaauagagcaaccaaauuccuggaaagcaucaaggggaaauuuacauccccuaaggauccgaaaaagaaggacucuauuauaucagugaacaguaucgauauugaggucacuaaagaaagcccaaucacguccaauucuaccauuaucaaccccacaaaugagacugacgauaccgccggaaacaagccuaauuaccagaggaaaccacucguuucguucaaggaggaccccacaccuucagauaacccauuuagcaaacuuuauaaggaaaccauagagacuuucgacaauaacgaagaggagaguuccuacucuuaugaagagaucaaugaucaaacaaacgacaauauuaccgcgcggcuggaucgcaucgacgaaaaguugagcgagauuuuagguaugcugcauacgcuagugguagcuuccgccggccccacuucagcacgagaugggauccgugacgccauggugggacucagagaagagaugauagagaaaauuaggaccgaagcucugaugacaaacgaccggcuugaggcaauggcccgccugagaaaugaagagagugaaaagauggcuaaagauacuagcgacgaggucucuuugaacccuaccuccgagaagcucaacaaucugcuggaaggcaacgauucagacaaugaucucagcuuagaggacuuuugaggacuaguggaagcauuuuccuggcugauuaaaagaaauuacucagcuauggucaucuguuccuguuagaaggcuaugcagcauauuauauacuaugcgcauguuaugaaaugcauaauaaaaaauuuuaaaaaaucuaaaagaucuaaaaaaaaaaaaaaaaaaaaaaaaaaaaaaaaaaaaaaaaaaaaaaaaaaaaaaaaaaaaaaaaugcaucccccccccccccccccccccccccccccccaaaggcucuuuucagagccaccagaauu

SEQ ID NO: 20843 - RNA, 1070 nt, Artificial Sequence
  mRNA product Design g-1 comprising derived and/or modified sequence from HRSV(Memphis-37)__AIY60637.1__P (opt4)
gggagacuuucccauucuguagcagaauuugguguugccuguggucuuggucccgcggagaagcuuaccauggagaaguucgcccccgaguuccacggcgaggacgccaacaacagagccaccaaguuccuggagagcaucaagggcaaguucaccagccccaaggaccccaagaagaaggacagcaucaucagcgugaacagcaucgacaucgaggugaccaaggagagccccaucaccagcaacagcaccaucaucaaccccaccaacgagaccgacgacaccgccggcaacaagcccaacuaccagagaaagccccuggugagcuucaaggaggaccccacccccagcgacaaccccuucagcaagcuguacaaggagaccaucgagaccuucgacaacaacgaggaggagagcagcuacagcuacgaggagaucaacgaccagaccaacgacaacaucaccgccagacuggacagaaucgacgagaagcugagcgagauccugggcaugcugcacacccuggugguggccagcgccggccccaccagcgccagagacggcaucagagacgccauggugggccugagagaggagaugaucgagaagaucagaaccgaggcccugaugaccaacgacagacuggaggccauggccagacugagaaacgaggagagcgagaagauggccaaggacaccagcgacgaggugagccugaaccccaccagcgagaagcugaacaaccugcuggagggcaacgacagcgacaacgaccugagccuggaggacuucugaggacuaguggaagcauuuuccuggcugauuaaaagaaauuacucagcuauggucaucuguuccuguuagaaggcuaugcagcauauuauauacuaugcgcauguuaugaaaugcauaauaaaaaauuuuaaaaaaucuaaaagaucuaaaaaaaaaaaaaaaaaaaaaaaaaaaaaaaaaaaaaaaaaaaaaaaaaaaaaaaaaaaaaaaaugcaucccccccccccccccccccccccccccccccaaaggcucuuuucagagccaccagaauu

SEQ ID NO: 20844 - RNA, 1070 nt, Artificial Sequence
  mRNA product Design g-1 comprising derived and/or modified sequence from HRSV(Memphis-37)__AIY60637.1__P (opt5)
gggagacuuucccauucuguagcagaauuugguguugccuguggucuuggucccgcggagaagcuuaccauggagaaguucgcccccgaauuucacggcgaggacgcuaacaauagagccaccaaauuccuggaaagcaucaaggggaaauuuacauccccuaaggauccgaaaaagaaggacucuauuaucagcgugaacuccauugauaucgaggucacgaaagaaucucccauuaccagcaauuccacaaucaucaacccuaccaaugagacagacgauaccgcgggaaacaagcccaauuaccagcggaaaccucucguuucuuucaaggaggaccccacaccuagcgauaacccguuuuccaaacuguauaaggaaaccauugagacguucgacaauaacgaagaggagagcucuuacuccuaugaagagaucaaugaucaaaccaacgacaauauuacagcucgccuugauagaaucgacgaaaagcugagcgagauucucggcaugcugcauacccuugugguggccucugccgggcccacauccgcucgggauggaauccgcgacgccauggucggccugagagaagagaugauugagaaaauccggaccgaagcucucaugacgaacgaccgccuggaggccauggcgagacugcggaaugaagagagcgaaaagauggccaaagauacaucugacgaggugucccucaacccuaccagcgagaagcugaacaaucuucuggaagggaacgauuccgacaaugaucucucucuggaggacuuuugaggacuaguggaagcauuuuccuggcugauuaaaagaaauuacucagcuauggucaucuguuccuguuagaaggcuaugcagcauauuauauacuaugcgcauguuaugaaaugcauaauaaaaaauuuuaaaaaaucuaaaagaucuaaaaaaaaaaaaaaaaaaaaaaaaaaaaaaaaaaaaaaaaaaaaaaaaaaaaaaaaaaaaaaaaugcaucccccccccccccccccccccccccccccccaaaggcucuuuucagagccaccagaauu

SEQ ID NO: 20845 - RNA, 1070 nt, Artificial Sequence
  mRNA product Design g-1 comprising derived and/or modified sequence from HRSV(Memphis-37)__AIY60637.1__P (opt6)
gggagacuuucccauucuguagcagaauuugguguugccuguggucuuggucccgcggagaagcuuaccauggaaaaauucgcaccagaauuccacggagaagacgcaaacaacagagcaacaaaauuccuagaaucaauaaaaggaaaauucacaagcccaaaagaucccaaaaaaaaagacucaaucauaagcguaaacucaauagauauagaaguaacaaaagaaaguccaauaacaagcaacaguacaauaauaaacccaacaaaugaaacagacgauacagcaggcaacaaaccaaacuaccaaagaaaaccgcuaguaaguuucaaagaagacccaacaccaagcgauaacccauuuucaaaauuauacaaagaaacaauagaaacauucgacaacaacgaagaagaaagcucauacucauacgaagaaauaaacgaccaaacaaacgacaacauaacagcgagauuagacagaauagacgaaaaacuaucagaaauacuaggcauguuacacacauuaguaguagcaagcgcaggaccaacaucagcaagagacggaauccgagacgcaaugguaggacuaagagaagaaaugauagaaaaaauaagaacagaagcacuaaugacaaacgacagacuagaagccauggcaagacuaagaaacgaagaaucagaaaaaauggcaaaagacacaucagacgaaguaucacuaaacccaacaagcgaaaaacuaaacaaccuauuagaaggaaacgacagcgacaacgaccuaucacucgaagacuucuaaggacuaguggaagcauuuuccuggcugauuaaaagaaauuacucagcuauggucaucuguuccuguuagaaggcuaugcagcauauuauauacuaugcgcauguuaugaaaugcauaauaaaaaauuuuaaaaaaucuaaaagaucuaaaaaaaaaaaaaaaaaaaaaaaaaaaaaaaaaaaaaaaaaaaaaaaaaaaaaaaaaaaaaaaaugcaucccccccccccccccccccccccccccccccaaaggcucuuuucagagccaccagaauu

SEQ ID NO: 20846 - RNA, 1070 nt, Artificial Sequence
  mRNA product Design g-1 comprising derived and/or modified sequence from HRSV(Memphis-37)__AIY60637.1__P (opt11)
gggagacuuucccauucuguagcagaauuugguguugccuguggucuuggucccgcggagaagcuuaccauggaaaaauucgccccagaauuucacggcgaagacgccaacaaccgagccaccaaauuccucgaaucaauaaaaggcaaauucacaucccccaaagaccccaaaaaaaaagacucgaucaucuccgugaacucaaucgacauagaagucaccaaagaaagccccaucaccuccaacagcaccaucaucaaccccacaaacgaaacagacgacaccgccggcaacaaaccaaacuaccaacgaaaaccccucgucagcuucaaagaagaccccacaccaagcgacaaccccuucuccaaacucuacaaagaaacaauagaaaccuucgacaacaacgaagaagaaagcucguacucauacgaagaaaucaacgaccaaaccaacgacaacaucaccgcccgccucgaccgcaucgacgaaaaacucuccgaaauccucggaaugcuccacacacucgucgucgccagcgccggccccaccucagcccgggacggcauccgcgacgccauggugggccuccgcgaggaaaugaucgaaaaaauccgcacagaagcccucaugaccaacgaccgccucgaagccauggcccgccuccgcaacgaagaauccgaaaaaauggccaaagacaccuccgacgaagucucacuaaaccccaccuccgaaaaacuaaacaaccuccuagaaggcaacgacagcgacaacgaccucucccuagaagacuucuaaggacuaguggaagcauuuuccuggcugauuaaaagaaauuacucagcuauggucaucuguuccuguuagaaggcuaugcagcauauuauauacuaugcgcauguuaugaaaugcauaauaaaaaauuuuaaaaaaucuaaaagaucuaaaaaaaaaaaaaaaaaaaaaaaaaaaaaaaaaaaaaaaaaaaaaaaaaaaaaaaaaaaaaaaaugcaucccccccccccccccccccccccccccccccaaaggcucuuuucagagccaccagaauu

SEQ ID NO: 20847 - RNA, 1085 nt, Artificial Sequence
  mRNA product Design g-2 comprising derived and/or modified sequence from HRSV(Memphis-37)__AIY60637.1__P (wt)
gggagaguccgcucagccagguugcagaagcggcuuagcguguguccuaaucuucucucugcguguagguaggccugugccgcaaacaagcuuaccauggaaaaguuugcuccugaauuccauggagaagacgcaaacaacagagccacuaaauuccuagaaucaauaaagggcaaauucacaucaccuaaagaucccaagaaaaaagauaguaucauaucugucaacucaauagauauagaaguaaccaaagaaagcccuauaacuucaaauucaaccauuauaaacccuacaaaugagacagaugauacugcagggaacaagcccaauuaucaaagaaaaccacuagugaguuucaaagaagacccuacgccaagugauaaucccuuuucaaaacuauacaaagaaaccauagaaacauuugauaacaaugaagaagaaucuagcuauucauaugaagaaauaaaugaucagacaaacgauaauauaacagcaagauuagauaggauugaugaaaaauuaagugaaauacuaggaaugcuucacacacuaguaguagcaagugcaggaccuacaucugcucgggaugguauaagagaugccaugguugguuuaagagaagaaaugauagaaaaaaucagaacugaagcauugaugaccaaugauagauuagaagcuauggcaagacucaggaaugaggaaagugaaaagauggcaaaagacacaucagaugaagugucucucaauccaacaucagagaaauugaacaaccuguuggaaggaaaugauagugauaaugaucuaucacuugaagauuucugaggacuaguaauaaggaaacuguaugaaugucugugggcaggaagugaagagauccuucuguaaagguuuuuggaauuaugucugcugaauaauaaacuuuuuugaaauaauaaaucugguagaaaaaugagaucuaaaaaaaaaaaaaaaaaaaaaaaaaaaaaaaaaaaaaaaaaaaaaaaaaaaaaaaaaaaaaaaaugcaucccccccccccccccccccccccccccccccaaaggcucuuuucagagccaccagaauu

SEQ ID NO: 20848 - RNA, 1085 nt, Artificial Sequence
  mRNA product Design g-2 comprising derived and/or modified sequence from HRSV(Memphis-37)__AIY60637.1__P (opt1)
gggagaguccgcucagccagguugcagaagcggcuuagcguguguccuaaucuucucucugcguguagguaggccugugccgcaaacaagcuuaccauggagaaguucgcccccgaguuccacggcgaggacgccaacaaccgcgcgaccaaguuccuggagagcaucaaggggaaguucaccuccccgaaggaccccaagaagaaggacagcaucaucuccgugaacagcaucgacaucgaggucacgaaggagucccccaucaccagcaacuccaccaucaucaaccccaccaacgagacggacgacaccgccggcaacaagccgaacuaccagcggaagccccucgugagcuucaaggaggaccccacccccuccgacaacccguucagcaagcuguacaaggagaccaucgagacguucgacaacaacgaggaggaguccagcuacuccuacgaggagaucaacgaccagaccaacgacaacaucaccgcccgccuggaccggaucgacgagaagcucagcgagauccuggggaugcugcacacccucguggucgccuccgccggccccacgagcgcgcgcgacgggauccgggacgccauggugggccugcgcgaggagaugaucgagaagauccggaccgaggcccugaugaccaacgaccgccucgaggccauggcgcggcugcgcaacgaggaguccgagaagauggccaaggacaccagcgacgaggugucccugaaccccacgagcgagaagcucaacaaccugcuggagggcaacgacagcgacaacgaccucucccuggaggacuucugaggacuaguaauaaggaaacuguaugaaugucugugggcaggaagugaagagauccuucuguaaagguuuuuggaauuaugucugcugaauaauaaacuuuuuugaaauaauaaaucugguagaaaaaugagaucuaaaaaaaaaaaaaaaaaaaaaaaaaaaaaaaaaaaaaaaaaaaaaaaaaaaaaaaaaaaaaaaaugcaucccccccccccccccccccccccccccccccaaaggcucuuuucagagccaccagaauu

SEQ ID NO: 20849 - RNA, 1085 nt, Artificial Sequence
  mRNA product Design g-2 comprising derived and/or modified sequence from HRSV(Memphis-37)__AIY60637.1__P (opt2)
gggagaguccgcucagccagguugcagaagcggcuuagcguguguccuaaucuucucucugcguguagguaggccugugccgcaaacaagcuuaccauggagaaguucgcccccgaguuccacggcgaggacgccaacaaccgcgccaccaaguuccucgaguccaucaagggcaaguucaccucccccaaggaccccaagaagaaggacuccaucaucuccgucaacuccaucgacaucgaggucaccaaggagucccccaucaccuccaacuccaccaucaucaaccccaccaacgagaccgacgacaccgccggcaacaagcccaacuaccagcgcaagccccucgucuccuucaaggaggaccccacccccuccgacaaccccuucuccaagcucuacaaggagaccaucgagaccuucgacaacaacgaggaggaguccuccuacuccuacgaggagaucaacgaccagaccaacgacaacaucaccgcccgccucgaccgcaucgacgagaagcucuccgagauccucggcaugcuccacacccucgucgucgccuccgccggccccaccuccgcccgcgacggcauccgcgacgccauggucggccuccgcgaggagaugaucgagaagauccgcaccgaggcccucaugaccaacgaccgccucgaggccauggcccgccuccgcaacgaggaguccgagaagauggccaaggacaccuccgacgaggucucccucaaccccaccuccgagaagcucaacaaccuccucgagggcaacgacuccgacaacgaccucucccucgaggacuucugaggacuaguaauaaggaaacuguaugaaugucugugggcaggaagugaagagauccuucuguaaagguuuuuggaauuaugucugcugaauaauaaacuuuuuugaaauaauaaaucugguagaaaaaugagaucuaaaaaaaaaaaaaaaaaaaaaaaaaaaaaaaaaaaaaaaaaaaaaaaaaaaaaaaaaaaaaaaaugcaucccccccccccccccccccccccccccccccaaaggcucuuuucagagccaccagaauu

SEQ ID NO: 20850 - RNA, 1085 nt, Artificial Sequence
  mRNA product Design g-2 comprising derived and/or modified sequence from HRSV(Memphis-37)__AIY60637.1__P (opt3)
gggagaguccgcucagccagguugcagaagcggcuuagcguguguccuaaucuucucucugcguguagguaggccugugccgcaaacaagcuuaccauggagaaguucgcccccgaauuucacggcgaggacgcuaacaauagagcaaccaaauuccuggaaagcaucaaggggaaauuuacauccccuaaggauccgaaaaagaaggacucuauuauaucagugaacaguaucgauauugaggucacuaaagaaagcccaaucacguccaauucuaccauuaucaaccccacaaaugagacugacgauaccgccggaaacaagccuaauuaccagaggaaaccacucguuucguucaaggaggaccccacaccuucagauaacccauuuagcaaacuuuauaaggaaaccauagagacuuucgacaauaacgaagaggagaguuccuacucuuaugaagagaucaaugaucaaacaaacgacaauauuaccgcgcggcuggaucgcaucgacgaaaaguugagcgagauuuuagguaugcugcauacgcuagugguagcuuccgccggccccacuucagcacgagaugggauccgugacgccauggugggacucagagaagagaugauagagaaaauuaggaccgaagcucugaugacaaacgaccggcuugaggcaauggcccgccugagaaaugaagagagugaaaagauggcuaaagauacuagcgacgaggucucuuugaacccuaccuccgagaagcucaacaaucugcuggaaggcaacgauucagacaaugaucucagcuuagaggacuuuugaggacuaguaauaaggaaacuguaugaaugucugugggcaggaagugaagagauccuucuguaaagguuuuuggaauuaugucugcugaauaauaaacuuuuuugaaauaauaaaucugguagaaaaaugagaucuaaaaaaaaaaaaaaaaaaaaaaaaaaaaaaaaaaaaaaaaaaaaaaaaaaaaaaaaaaaaaaaaugcaucccccccccccccccccccccccccccccccaaaggcucuuuucagagccaccagaauu

SEQ ID NO: 20851 - RNA, 1085 nt, Artificial Sequence
  mRNA product Design g-2 comprising derived and/or modified sequence from HRSV(Memphis-37)__AIY60637.1__P (opt4)
gggagaguccgcucagccagguugcagaagcggcuuagcguguguccuaaucuucucucugcguguagguaggccugugccgcaaacaagcuuaccauggagaaguucgcccccgaguuccacggcgaggacgccaacaacagagccaccaaguuccuggagagcaucaagggcaaguucaccagccccaaggaccccaagaagaaggacagcaucaucagcgugaacagcaucgacaucgaggugaccaaggagagccccaucaccagcaacagcaccaucaucaaccccaccaacgagaccgacgacaccgccggcaacaagcccaacuaccagagaaagccccuggugagcuucaaggaggaccccacccccagcgacaaccccuucagcaagcuguacaaggagaccaucgagaccuucgacaacaacgaggaggagagcagcuacagcuacgaggagaucaacgaccagaccaacgacaacaucaccgccagacuggacagaaucgacgagaagcugagcgagauccugggcaugcugcacacccuggugguggccagcgccggccccaccagcgccagagacggcaucagagacgccauggugggccugagagaggagaugaucgagaagaucagaaccgaggcccugaugaccaacgacagacuggaggccauggccagacugagaaacgaggagagcgagaagauggccaaggacaccagcgacgaggugagccugaaccccaccagcgagaagcugaacaaccugcuggagggcaacgacagcgacaacgaccugagccuggaggacuucugaggacuaguaauaaggaaacuguaugaaugucugugggcaggaagugaagagauccuucuguaaagguuuuuggaauuaugucugcugaauaauaaacuuuuuugaaauaauaaaucugguagaaaaaugagaucuaaaaaaaaaaaaaaaaaaaaaaaaaaaaaaaaaaaaaaaaaaaaaaaaaaaaaaaaaaaaaaaaugcaucccccccccccccccccccccccccccccccaaaggcucuuuucagagccaccagaauu

SEQ ID NO: 20852 - RNA, 1085 nt, Artificial Sequence
  mRNA product Design g-2 comprising derived and/or modified sequence from HRSV(Memphis-37)__AIY60637.1__P (opt5)
gggagaguccgcucagccagguugcagaagcggcuuagcguguguccuaaucuucucucugcguguagguaggccugugccgcaaacaagcuuaccauggagaaguucgcccccgaauuucacggcgaggacgcuaacaauagagccaccaaauuccuggaaagcaucaaggggaaauuuacauccccuaaggauccgaaaaagaaggacucuauuaucagcgugaacuccauugauaucgaggucacgaaagaaucucccauuaccagcaauuccacaaucaucaacccuaccaaugagacagacgauaccgcgggaaacaagcccaauuaccagcggaaaccucucguuucuuucaaggaggaccccacaccuagcgauaacccguuuuccaaacuguauaaggaaaccauugagacguucgacaauaacgaagaggagagcucuuacuccuaugaagagaucaaugaucaaaccaacgacaauauuacagcucgccuugauagaaucgacgaaaagcugagcgagauucucggcaugcugcauacccuugugguggccucugccgggcccacauccgcucgggauggaauccgcgacgccauggucggccugagagaagagaugauugagaaaauccggaccgaagcucucaugacgaacgaccgccuggaggccauggcgagacugcggaaugaagagagcgaaaagauggccaaagauacaucugacgaggugucccucaacccuaccagcgagaagcugaacaaucuucuggaagggaacgauuccgacaaugaucucucucuggaggacuuuugaggacuaguaauaaggaaacuguaugaaugucugugggcaggaagugaagagauccuucuguaaagguuuuuggaauuaugucugcugaauaauaaacuuuuuugaaauaauaaaucugguagaaaaaugagaucuaaaaaaaaaaaaaaaaaaaaaaaaaaaaaaaaaaaaaaaaaaaaaaaaaaaaaaaaaaaaaaaaugcaucccccccccccccccccccccccccccccccaaaggcucuuuucagagccaccagaauu

SEQ ID NO: 20853 - RNA, 1085 nt, Artificial Sequence
  mRNA product Design g-2 comprising derived and/or modified sequence from HRSV(Memphis-37)__AIY60637.1__P (opt6)
gggagaguccgcucagccagguugcagaagcggcuuagcguguguccuaaucuucucucugcguguagguaggccugugccgcaaacaagcuuaccauggaaaaauucgcaccagaauuccacggagaagacgcaaacaacagagcaacaaaauuccuagaaucaauaaaaggaaaauucacaagcccaaaagaucccaaaaaaaaagacucaaucauaagcguaaacucaauagauauagaaguaacaaaagaaaguccaauaacaagcaacaguacaauaauaaacccaacaaaugaaacagacgauacagcaggcaacaaaccaaacuaccaaagaaaaccgcuaguaaguuucaaagaagacccaacaccaagcgauaacccauuuucaaaauuauacaaagaaacaauagaaacauucgacaacaacgaagaagaaagcucauacucauacgaagaaauaaacgaccaaacaaacgacaacauaacagcgagauuagacagaauagacgaaaaacuaucagaaauacuaggcauguuacacacauuaguaguagcaagcgcaggaccaacaucagcaagagacggaauccgagacgcaaugguaggacuaagagaagaaaugauagaaaaaauaagaacagaagcacuaaugacaaacgacagacuagaagccauggcaagacuaagaaacgaagaaucagaaaaaauggcaaaagacacaucagacgaaguaucacuaaacccaacaagcgaaaaacuaaacaaccuauuagaaggaaacgacagcgacaacgaccuaucacucgaagacuucuaaggacuaguaauaaggaaacuguaugaaugucugugggcaggaagugaagagauccuucuguaaagguuuuuggaauuaugucugcugaauaauaaacuuuuuugaaauaauaaaucugguagaaaaaugagaucuaaaaaaaaaaaaaaaaaaaaaaaaaaaaaaaaaaaaaaaaaaaaaaaaaaaaaaaaaaaaaaaaugcaucccccccccccccccccccccccccccccccaaaggcucuuuucagagccaccagaauu

SEQ ID NO: 20854 - RNA, 1085 nt, Artificial Sequence
  mRNA product Design g-2 comprising derived and/or modified sequence from HRSV(Memphis-37)__AIY60637.1__P (opt11)
gggagaguccgcucagccagguugcagaagcggcuuagcguguguccuaaucuucucucugcguguagguaggccugugccgcaaacaagcuuaccauggaaaaauucgccccagaauuucacggcgaagacgccaacaaccgagccaccaaauuccucgaaucaauaaaaggcaaauucacaucccccaaagaccccaaaaaaaaagacucgaucaucuccgugaacucaaucgacauagaagucaccaaagaaagccccaucaccuccaacagcaccaucaucaaccccacaaacgaaacagacgacaccgccggcaacaaaccaaacuaccaacgaaaaccccucgucagcuucaaagaagaccccacaccaagcgacaaccccuucuccaaacucuacaaagaaacaauagaaaccuucgacaacaacgaagaagaaagcucguacucauacgaagaaaucaacgaccaaaccaacgacaacaucaccgcccgccucgaccgcaucgacgaaaaacucuccgaaauccucggaaugcuccacacacucgucgucgccagcgccggccccaccucagcccgggacggcauccgcgacgccauggugggccuccgcgaggaaaugaucgaaaaaauccgcacagaagcccucaugaccaacgaccgccucgaagccauggcccgccuccgcaacgaagaauccgaaaaaauggccaaagacaccuccgacgaagucucacuaaaccccaccuccgaaaaacuaaacaaccuccuagaaggcaacgacagcgacaacgaccucucccuagaagacuucuaaggacuaguaauaaggaaacuguaugaaugucugugggcaggaagugaagagauccuucuguaaagguuuuuggaauuaugucugcugaauaauaaacuuuuuugaaauaauaaaucugguagaaaaaugagaucuaaaaaaaaaaaaaaaaaaaaaaaaaaaaaaaaaaaaaaaaaaaaaaaaaaaaaaaaaaaaaaaaugcaucccccccccccccccccccccccccccccccaaaggcucuuuucagagccaccagaauu

SEQ ID NO: 20855 - RNA, 1317 nt, Artificial Sequence
  mRNA product Design g-3 comprising derived and/or modified sequence from HRSV(Memphis-37)__AIY60637.1__P (wt)
gggagaguccgcucagccagguugcagaagcggcuuagcguguguccuaaucuucucucugcguguagguaggccugugccgcaaacaagcuuaccauggaaaaguuugcuccugaauuccauggagaagacgcaaacaacagagccacuaaauuccuagaaucaauaaagggcaaauucacaucaccuaaagaucccaagaaaaaagauaguaucauaucugucaacucaauagauauagaaguaaccaaagaaagcccuauaacuucaaauucaaccauuauaaacccuacaaaugagacagaugauacugcagggaacaagcccaauuaucaaagaaaaccacuagugaguuucaaagaagacccuacgccaagugauaaucccuuuucaaaacuauacaaagaaaccauagaaacauuugauaacaaugaagaagaaucuagcuauucauaugaagaaauaaaugaucagacaaacgauaauauaacagcaagauuagauaggauugaugaaaaauuaagugaaauacuaggaaugcuucacacacuaguaguagcaagugcaggaccuacaucugcucgggaugguauaagagaugccaugguugguuuaagagaagaaaugauagaaaaaaucagaacugaagcauugaugaccaaugauagauuagaagcuauggcaagacucaggaaugaggaaagugaaaagauggcaaaagacacaucagaugaagugucucucaauccaacaucagagaaauugaacaaccuguuggaaggaaaugauagugauaaugaucuaucacuugaagauuucugaggacuagugaagggaacacccaaauuuaauucagccuuaagcacaauuaauuaagagugaaacguaauuguacaagcaguuggucacccaccauagggcaugaucaacaccgcaaccuuuccuuuuucccccagugauucugaaaaaccccucuucccuucagcuugcuuagauguuccaaauuuaguaagcuuaaggcggccuacagaagaaaaagaaaaaaaaggccacaaaaguucccucucacuuucaguaaauaaaauaaaagcagcaacagaaauaaagaaauaaaugaaauucaaaaugaaauaaauauuguguugugcagcauuaaaaaaucaauaaaaauuaaaaaugagcaagaucuaaaaaaaaaaaaaaaaaaaaaaaaaaaaaaaaaaaaaaaaaaaaaaaaaaaaaaaaaaaaaaaaugcaucccccccccccccccccccccccccccccccaaaggcucuuuucagagccaccagaauu

SEQ ID NO: 20856 - RNA, 1317 nt, Artificial Sequence
  mRNA product Design g-3 comprising derived and/or modified sequence from HRSV(Memphis-37)__AIY60637.1__P (opt1)
gggagaguccgcucagccagguugcagaagcggcuuagcguguguccuaaucuucucucugcguguagguaggccugugccgcaaacaagcuuaccauggagaaguucgcccccgaguuccacggcgaggacgccaacaaccgcgcgaccaaguuccuggagagcaucaaggggaaguucaccuccccgaaggaccccaagaagaaggacagcaucaucuccgugaacagcaucgacaucgaggucacgaaggagucccccaucaccagcaacuccaccaucaucaaccccaccaacgagacggacgacaccgccggcaacaagccgaacuaccagcggaagccccucgugagcuucaaggaggaccccacccccuccgacaacccguucagcaagcuguacaaggagaccaucgagacguucgacaacaacgaggaggaguccagcuacuccuacgaggagaucaacgaccagaccaacgacaacaucaccgcccgccuggaccggaucgacgagaagcucagcgagauccuggggaugcugcacacccucguggucgccuccgccggccccacgagcgcgcgcgacgggauccgggacgccauggugggccugcgcgaggagaugaucgagaagauccggaccgaggcccugaugaccaacgaccgccucgaggccauggcgcggcugcgcaacgaggaguccgagaagauggccaaggacaccagcgacgaggugucccugaaccccacgagcgagaagcucaacaaccugcuggagggcaacgacagcgacaacgaccucucccuggaggacuucugaggacuagugaagggaacacccaaauuuaauucagccuuaagcacaauuaauuaagagugaaacguaauuguacaagcaguuggucacccaccauagggcaugaucaacaccgcaaccuuuccuuuuucccccagugauucugaaaaaccccucuucccuucagcuugcuuagauguuccaaauuuaguaagcuuaaggcggccuacagaagaaaaagaaaaaaaaggccacaaaaguucccucucacuuucaguaaauaaaauaaaagcagcaacagaaauaaagaaauaaaugaaauucaaaaugaaauaaauauuguguugugcagcauuaaaaaaucaauaaaaauuaaaaaugagcaagaucuaaaaaaaaaaaaaaaaaaaaaaaaaaaaaaaaaaaaaaaaaaaaaaaaaaaaaaaaaaaaaaaaugcaucccccccccccccccccccccccccccccccaaaggcucuuuucagagccaccagaauu

SEQ ID NO: 20857 - RNA, 1317 nt, Artificial Sequence
  mRNA product Design g-3 comprising derived and/or modified sequence from HRSV(Memphis-37)__AIY60637.1__P (opt2)
gggagaguccgcucagccagguugcagaagcggcuuagcguguguccuaaucuucucucugcguguagguaggccugugccgcaaacaagcuuaccauggagaaguucgcccccgaguuccacggcgaggacgccaacaaccgcgccaccaaguuccucgaguccaucaagggcaaguucaccucccccaaggaccccaagaagaaggacuccaucaucuccgucaacuccaucgacaucgaggucaccaaggagucccccaucaccuccaacuccaccaucaucaaccccaccaacgagaccgacgacaccgccggcaacaagcccaacuaccagcgcaagccccucgucuccuucaaggaggaccccacccccuccgacaaccccuucuccaagcucuacaaggagaccaucgagaccuucgacaacaacgaggaggaguccuccuacuccuacgaggagaucaacgaccagaccaacgacaacaucaccgcccgccucgaccgcaucgacgagaagcucuccgagauccucggcaugcuccacacccucgucgucgccuccgccggccccaccuccgcccgcgacggcauccgcgacgccauggucggccuccgcgaggagaugaucgagaagauccgcaccgaggcccucaugaccaacgaccgccucgaggccauggcccgccuccgcaacgaggaguccgagaagauggccaaggacaccuccgacgaggucucccucaaccccaccuccgagaagcucaacaaccuccucgagggcaacgacuccgacaacgaccucucccucgaggacuucugaggacuagugaagggaacacccaaauuuaauucagccuuaagcacaauuaauuaagagugaaacguaauuguacaagcaguuggucacccaccauagggcaugaucaacaccgcaaccuuuccuuuuucccccagugauucugaaaaaccccucuucccuucagcuugcuuagauguuccaaauuuaguaagcuuaaggcggccuacagaagaaaaagaaaaaaaaggccacaaaaguucccucucacuuucaguaaauaaaauaaaagcagcaacagaaauaaagaaauaaaugaaauucaaaaugaaauaaauauuguguugugcagcauuaaaaaaucaauaaaaauuaaaaaugagcaagaucuaaaaaaaaaaaaaaaaaaaaaaaaaaaaaaaaaaaaaaaaaaaaaaaaaaaaaaaaaaaaaaaaugcaucccccccccccccccccccccccccccccccaaaggcucuuuucagagccaccagaauu

SEQ ID NO: 20858 - RNA, 1317 nt, Artificial Sequence
  mRNA product Design g-3 comprising derived and/or modified sequence from HRSV(Memphis-37)__AIY60637.1__P (opt3)
gggagaguccgcucagccagguugcagaagcggcuuagcguguguccuaaucuucucucugcguguagguaggccugugccgcaaacaagcuuaccauggagaaguucgcccccgaauuucacggcgaggacgcuaacaauagagcaaccaaauuccuggaaagcaucaaggggaaauuuacauccccuaaggauccgaaaaagaaggacucuauuauaucagugaacaguaucgauauugaggucacuaaagaaagcccaaucacguccaauucuaccauuaucaaccccacaaaugagacugacgauaccgccggaaacaagccuaauuaccagaggaaaccacucguuucguucaaggaggaccccacaccuucagauaacccauuuagcaaacuuuauaaggaaaccauagagacuuucgacaauaacgaagaggagaguuccuacucuuaugaagagaucaaugaucaaacaaacgacaauauuaccgcgcggcuggaucgcaucgacgaaaaguugagcgagauuuuagguaugcugcauacgcuagugguagcuuccgccggccccacuucagcacgagaugggauccgugacgccauggugggacucagagaagagaugauagagaaaauuaggaccgaagcucugaugacaaacgaccggcuugaggcaauggcccgccugagaaaugaagagagugaaaagauggcuaaagauacuagcgacgaggucucuuugaacccuaccuccgagaagcucaacaaucugcuggaaggcaacgauucagacaaugaucucagcuuagaggacuuuugaggacuagugaagggaacacccaaauuuaauucagccuuaagcacaauuaauuaagagugaaacguaauuguacaagcaguuggucacccaccauagggcaugaucaacaccgcaaccuuuccuuuuucccccagugauucugaaaaaccccucuucccuucagcuugcuuagauguuccaaauuuaguaagcuuaaggcggccuacagaagaaaaagaaaaaaaaggccacaaaaguucccucucacuuucaguaaauaaaauaaaagcagcaacagaaauaaagaaauaaaugaaauucaaaaugaaauaaauauuguguugugcagcauuaaaaaaucaauaaaaauuaaaaaugagcaagaucuaaaaaaaaaaaaaaaaaaaaaaaaaaaaaaaaaaaaaaaaaaaaaaaaaaaaaaaaaaaaaaaaugcaucccccccccccccccccccccccccccccccaaaggcucuuuucagagccaccagaauu

SEQ ID NO: 20859 - RNA, 1317 nt, Artificial Sequence
  mRNA product Design g-3 comprising derived and/or modified sequence from HRSV(Memphis-37)__AIY60637.1__P (opt4)
gggagaguccgcucagccagguugcagaagcggcuuagcguguguccuaaucuucucucugcguguagguaggccugugccgcaaacaagcuuaccauggagaaguucgcccccgaguuccacggcgaggacgccaacaacagagccaccaaguuccuggagagcaucaagggcaaguucaccagccccaaggaccccaagaagaaggacagcaucaucagcgugaacagcaucgacaucgaggugaccaaggagagccccaucaccagcaacagcaccaucaucaaccccaccaacgagaccgacgacaccgccggcaacaagcccaacuaccagagaaagccccuggugagcuucaaggaggaccccacccccagcgacaaccccuucagcaagcuguacaaggagaccaucgagaccuucgacaacaacgaggaggagagcagcuacagcuacgaggagaucaacgaccagaccaacgacaacaucaccgccagacuggacagaaucgacgagaagcugagcgagauccugggcaugcugcacacccuggugguggccagcgccggccccaccagcgccagagacggcaucagagacgccauggugggccugagagaggagaugaucgagaagaucagaaccgaggcccugaugaccaacgacagacuggaggccauggccagacugagaaacgaggagagcgagaagauggccaaggacaccagcgacgaggugagccugaaccccaccagcgagaagcugaacaaccugcuggagggcaacgacagcgacaacgaccugagccuggaggacuucugaggacuagugaagggaacacccaaauuuaauucagccuuaagcacaauuaauuaagagugaaacguaauuguacaagcaguuggucacccaccauagggcaugaucaacaccgcaaccuuuccuuuuucccccagugauucugaaaaaccccucuucccuucagcuugcuuagauguuccaaauuuaguaagcuuaaggcggccuacagaagaaaaagaaaaaaaaggccacaaaaguucccucucacuuucaguaaauaaaauaaaagcagcaacagaaauaaagaaauaaaugaaauucaaaaugaaauaaauauuguguugugcagcauuaaaaaaucaauaaaaauuaaaaaugagcaagaucuaaaaaaaaaaaaaaaaaaaaaaaaaaaaaaaaaaaaaaaaaaaaaaaaaaaaaaaaaaaaaaaaugcaucccccccccccccccccccccccccccccccaaaggcucuuuucagagccaccagaauu

SEQ ID NO: 20860 - RNA, 1317 nt, Artificial Sequence
  mRNA product Design g-3 comprising derived and/or modified sequence from HRSV(Memphis-37)__AIY60637.1__P (opt5)
gggagaguccgcucagccagguugcagaagcggcuuagcguguguccuaaucuucucucugcguguagguaggccugugccgcaaacaagcuuaccauggagaaguucgcccccgaauuucacggcgaggacgcuaacaauagagccaccaaauuccuggaaagcaucaaggggaaauuuacauccccuaaggauccgaaaaagaaggacucuauuaucagcgugaacuccauugauaucgaggucacgaaagaaucucccauuaccagcaauuccacaaucaucaacccuaccaaugagacagacgauaccgcgggaaacaagcccaauuaccagcggaaaccucucguuucuuucaaggaggaccccacaccuagcgauaacccguuuuccaaacuguauaaggaaaccauugagacguucgacaauaacgaagaggagagcucuuacuccuaugaagagaucaaugaucaaaccaacgacaauauuacagcucgccuugauagaaucgacgaaaagcugagcgagauucucggcaugcugcauacccuugugguggccucugccgggcccacauccgcucgggauggaauccgcgacgccauggucggccugagagaagagaugauugagaaaauccggaccgaagcucucaugacgaacgaccgccuggaggccauggcgagacugcggaaugaagagagcgaaaagauggccaaagauacaucugacgaggugucccucaacccuaccagcgagaagcugaacaaucuucuggaagggaacgauuccgacaaugaucucucucuggaggacuuuugaggacuagugaagggaacacccaaauuuaauucagccuuaagcacaauuaauuaagagugaaacguaauuguacaagcaguuggucacccaccauagggcaugaucaacaccgcaaccuuuccuuuuucccccagugauucugaaaaaccccucuucccuucagcuugcuuagauguuccaaauuuaguaagcuuaaggcggccuacagaagaaaaagaaaaaaaaggccacaaaaguucccucucacuuucaguaaauaaaauaaaagcagcaacagaaauaaagaaauaaaugaaauucaaaaugaaauaaauauuguguugugcagcauuaaaaaaucaauaaaaauuaaaaaugagcaagaucuaaaaaaaaaaaaaaaaaaaaaaaaaaaaaaaaaaaaaaaaaaaaaaaaaaaaaaaaaaaaaaaaugcaucccccccccccccccccccccccccccccccaaaggcucuuuucagagccaccagaauu

SEQ ID NO: 20861 - RNA, 1317 nt, Artificial Sequence
  mRNA product Design g-3 comprising derived and/or modified sequence from HRSV(Memphis-37)__AIY60637.1__P (opt6)
gggagaguccgcucagccagguugcagaagcggcuuagcguguguccuaaucuucucucugcguguagguaggccugugccgcaaacaagcuuaccauggaaaaauucgcaccagaauuccacggagaagacgcaaacaacagagcaacaaaauuccuagaaucaauaaaaggaaaauucacaagcccaaaagaucccaaaaaaaaagacucaaucauaagcguaaacucaauagauauagaaguaacaaaagaaaguccaauaacaagcaacaguacaauaauaaacccaacaaaugaaacagacgauacagcaggcaacaaaccaaacuaccaaagaaaaccgcuaguaaguuucaaagaagacccaacaccaagcgauaacccauuuucaaaauuauacaaagaaacaauagaaacauucgacaacaacgaagaagaaagcucauacucauacgaagaaauaaacgaccaaacaaacgacaacauaacagcgagauuagacagaauagacgaaaaacuaucagaaauacuaggcauguuacacacauuaguaguagcaagcgcaggaccaacaucagcaagagacggaauccgagacgcaaugguaggacuaagagaagaaaugauagaaaaaauaagaacagaagcacuaaugacaaacgacagacuagaagccauggcaagacuaagaaacgaagaaucagaaaaaauggcaaaagacacaucagacgaaguaucacuaaacccaacaagcgaaaaacuaaacaaccuauuagaaggaaacgacagcgacaacgaccuaucacucgaagacuucuaaggacuagugaagggaacacccaaauuuaauucagccuuaagcacaauuaauuaagagugaaacguaauuguacaagcaguuggucacccaccauagggcaugaucaacaccgcaaccuuuccuuuuucccccagugauucugaaaaaccccucuucccuucagcuugcuuagauguuccaaauuuaguaagcuuaaggcggccuacagaagaaaaagaaaaaaaaggccacaaaaguucccucucacuuucaguaaauaaaauaaaagcagcaacagaaauaaagaaauaaaugaaauucaaaaugaaauaaauauuguguugugcagcauuaaaaaaucaauaaaaauuaaaaaugagcaagaucuaaaaaaaaaaaaaaaaaaaaaaaaaaaaaaaaaaaaaaaaaaaaaaaaaaaaaaaaaaaaaaaaugcaucccccccccccccccccccccccccccccccaaaggcucuuuucagagccaccagaauu

SEQ ID NO: 20862 - RNA, 1317 nt, Artificial Sequence
  mRNA product Design g-3 comprising derived and/or modified sequence from HRSV(Memphis-37)__AIY60637.1__P (opt11)
gggagaguccgcucagccagguugcagaagcggcuuagcguguguccuaaucuucucucugcguguagguaggccugugccgcaaacaagcuuaccauggaaaaauucgccccagaauuucacggcgaagacgccaacaaccgagccaccaaauuccucgaaucaauaaaaggcaaauucacaucccccaaagaccccaaaaaaaaagacucgaucaucuccgugaacucaaucgacauagaagucaccaaagaaagccccaucaccuccaacagcaccaucaucaaccccacaaacgaaacagacgacaccgccggcaacaaaccaaacuaccaacgaaaaccccucgucagcuucaaagaagaccccacaccaagcgacaaccccuucuccaaacucuacaaagaaacaauagaaaccuucgacaacaacgaagaagaaagcucguacucauacgaagaaaucaacgaccaaaccaacgacaacaucaccgcccgccucgaccgcaucgacgaaaaacucuccgaaauccucggaaugcuccacacacucgucgucgccagcgccggccccaccucagcccgggacggcauccgcgacgccauggugggccuccgcgaggaaaugaucgaaaaaauccgcacagaagcccucaugaccaacgaccgccucgaagccauggcccgccuccgcaacgaagaauccgaaaaaauggccaaagacaccuccgacgaagucucacuaaaccccaccuccgaaaaacuaaacaaccuccuagaaggcaacgacagcgacaacgaccucucccuagaagacuucuaaggacuagugaagggaacacccaaauuuaauucagccuuaagcacaauuaauuaagagugaaacguaauuguacaagcaguuggucacccaccauagggcaugaucaacaccgcaaccuuuccuuuuucccccagugauucugaaaaaccccucuucccuucagcuugcuuagauguuccaaauuuaguaagcuuaaggcggccuacagaagaaaaagaaaaaaaaggccacaaaaguucccucucacuuucaguaaauaaaauaaaagcagcaacagaaauaaagaaauaaaugaaauucaaaaugaaauaaauauuguguugugcagcauuaaaaaaucaauaaaaauuaaaaaugagcaagaucuaaaaaaaaaaaaaaaaaaaaaaaaaaaaaaaaaaaaaaaaaaaaaaaaaaaaaaaaaaaaaaaaugcaucccccccccccccccccccccccccccccccaaaggcucuuuucagagccaccagaauu

SEQ ID NO: 20863 - RNA, 1112 nt, Artificial Sequence
  mRNA product Design g-4 comprising derived and/or modified sequence from HRSV(Memphis-37)__AIY60637.1__P (wt)
gggagacuccugucgggcggaaguaggaggaguagaguuuaaaaacaguacucuuuuuccgguucgggacguaguugaagcaacgacaagccggauaaccgcucuugagacaggaagcuuaccauggaaaaguuugcuccugaauuccauggagaagacgcaaacaacagagccacuaaauuccuagaaucaauaaagggcaaauucacaucaccuaaagaucccaagaaaaaagauaguaucauaucugucaacucaauagauauagaaguaaccaaagaaagcccuauaacuucaaauucaaccauuauaaacccuacaaaugagacagaugauacugcagggaacaagcccaauuaucaaagaaaaccacuagugaguuucaaagaagacccuacgccaagugauaaucccuuuucaaaacuauacaaagaaaccauagaaacauuugauaacaaugaagaagaaucuagcuauucauaugaagaaauaaaugaucagacaaacgauaauauaacagcaagauuagauaggauugaugaaaaauuaagugaaauacuaggaaugcuucacacacuaguaguagcaagugcaggaccuacaucugcucgggaugguauaagagaugccaugguugguuuaagagaagaaaugauagaaaaaaucagaacugaagcauugaugaccaaugauagauuagaagcuauggcaagacucaggaaugaggaaagugaaaagauggcaaaagacacaucagaugaagugucucucaauccaacaucagagaaauugaacaaccuguuggaaggaaaugauagugauaaugaucuaucacuugaagauuucugaggacuaguaauaaggaaacuguaugaaugucugugggcaggaagugaagagauccuucuguaaagguuuuuggaauuaugucugcugaauaauaaacuuuuuugaaauaauaaaucugguagaaaaaugagaucuaaaaaaaaaaaaaaaaaaaaaaaaaaaaaaaaaaaaaaaaaaaaaaaaaaaaaaaaaaaaaaaaugcaucccccccccccccccccccccccccccccccaaaggcucuuuucagagccaccagaauu

SEQ ID NO: 20864 - RNA, 1112 nt, Artificial Sequence
  mRNA product Design g-4 comprising derived and/or modified sequence from HRSV(Memphis-37)__AIY60637.1__P (opt1)
gggagacuccugucgggcggaaguaggaggaguagaguuuaaaaacaguacucuuuuuccgguucgggacguaguugaagcaacgacaagccggauaaccgcucuugagacaggaagcuuaccauggagaaguucgcccccgaguuccacggcgaggacgccaacaaccgcgcgaccaaguuccuggagagcaucaaggggaaguucaccuccccgaaggaccccaagaagaaggacagcaucaucuccgugaacagcaucgacaucgaggucacgaaggagucccccaucaccagcaacuccaccaucaucaaccccaccaacgagacggacgacaccgccggcaacaagccgaacuaccagcggaagccccucgugagcuucaaggaggaccccacccccuccgacaacccguucagcaagcuguacaaggagaccaucgagacguucgacaacaacgaggaggaguccagcuacuccuacgaggagaucaacgaccagaccaacgacaacaucaccgcccgccuggaccggaucgacgagaagcucagcgagauccuggggaugcugcacacccucguggucgccuccgccggccccacgagcgcgcgcgacgggauccgggacgccauggugggccugcgcgaggagaugaucgagaagauccggaccgaggcccugaugaccaacgaccgccucgaggccauggcgcggcugcgcaacgaggaguccgagaagauggccaaggacaccagcgacgaggugucccugaaccccacgagcgagaagcucaacaaccugcuggagggcaacgacagcgacaacgaccucucccuggaggacuucugaggacuaguaauaaggaaacuguaugaaugucugugggcaggaagugaagagauccuucuguaaagguuuuuggaauuaugucugcugaauaauaaacuuuuuugaaauaauaaaucugguagaaaaaugagaucuaaaaaaaaaaaaaaaaaaaaaaaaaaaaaaaaaaaaaaaaaaaaaaaaaaaaaaaaaaaaaaaaugcaucccccccccccccccccccccccccccccccaaaggcucuuuucagagccaccagaauu

SEQ ID NO: 20865 - RNA, 1112 nt, Artificial Sequence
  mRNA product Design g-4 comprising derived and/or modified sequence from HRSV(Memphis-37)__AIY60637.1__P (opt2)
gggagacuccugucgggcggaaguaggaggaguagaguuuaaaaacaguacucuuuuuccgguucgggacguaguugaagcaacgacaagccggauaaccgcucuugagacaggaagcuuaccauggagaaguucgcccccgaguuccacggcgaggacgccaacaaccgcgccaccaaguuccucgaguccaucaagggcaaguucaccucccccaaggaccccaagaagaaggacuccaucaucuccgucaacuccaucgacaucgaggucaccaaggagucccccaucaccuccaacuccaccaucaucaaccccaccaacgagaccgacgacaccgccggcaacaagcccaacuaccagcgcaagccccucgucuccuucaaggaggaccccacccccuccgacaaccccuucuccaagcucuacaaggagaccaucgagaccuucgacaacaacgaggaggaguccuccuacuccuacgaggagaucaacgaccagaccaacgacaacaucaccgcccgccucgaccgcaucgacgagaagcucuccgagauccucggcaugcuccacacccucgucgucgccuccgccggccccaccuccgcccgcgacggcauccgcgacgccauggucggccuccgcgaggagaugaucgagaagauccgcaccgaggcccucaugaccaacgaccgccucgaggccauggcccgccuccgcaacgaggaguccgagaagauggccaaggacaccuccgacgaggucucccucaaccccaccuccgagaagcucaacaaccuccucgagggcaacgacuccgacaacgaccucucccucgaggacuucugaggacuaguaauaaggaaacuguaugaaugucugugggcaggaagugaagagauccuucuguaaagguuuuuggaauuaugucugcugaauaauaaacuuuuuugaaauaauaaaucugguagaaaaaugagaucuaaaaaaaaaaaaaaaaaaaaaaaaaaaaaaaaaaaaaaaaaaaaaaaaaaaaaaaaaaaaaaaaugcaucccccccccccccccccccccccccccccccaaaggcucuuuucagagccaccagaauu

SEQ ID NO: 20866 - RNA, 1112 nt, Artificial Sequence
  mRNA product Design g-4 comprising derived and/or modified sequence from HRSV(Memphis-37)__AIY60637.1__P (opt3)
gggagacuccugucgggcggaaguaggaggaguagaguuuaaaaacaguacucuuuuuccgguucgggacguaguugaagcaacgacaagccggauaaccgcucuugagacaggaagcuuaccauggagaaguucgcccccgaauuucacggcgaggacgcuaacaauagagcaaccaaauuccuggaaagcaucaaggggaaauuuacauccccuaaggauccgaaaaagaaggacucuauuauaucagugaacaguaucgauauugaggucacuaaagaaagcccaaucacguccaauucuaccauuaucaaccccacaaaugagacugacgauaccgccggaaacaagccuaauuaccagaggaaaccacucguuucguucaaggaggaccccacaccuucagauaacccauuuagcaaacuuuauaaggaaaccauagagacuuucgacaauaacgaagaggagaguuccuacucuuaugaagagaucaaugaucaaacaaacgacaauauuaccgcgcggcuggaucgcaucgacgaaaaguugagcgagauuuuagguaugcugcauacgcuagugguagcuuccgccggccccacuucagcacgagaugggauccgugacgccauggugggacucagagaagagaugauagagaaaauuaggaccgaagcucugaugacaaacgaccggcuugaggcaauggcccgccugagaaaugaagagagugaaaagauggcuaaagauacuagcgacgaggucucuuugaacccuaccuccgagaagcucaacaaucugcuggaaggcaacgauucagacaaugaucucagcuuagaggacuuuugaggacuaguaauaaggaaacuguaugaaugucugugggcaggaagugaagagauccuucuguaaagguuuuuggaauuaugucugcugaauaauaaacuuuuuugaaauaauaaaucugguagaaaaaugagaucuaaaaaaaaaaaaaaaaaaaaaaaaaaaaaaaaaaaaaaaaaaaaaaaaaaaaaaaaaaaaaaaaugcaucccccccccccccccccccccccccccccccaaaggcucuuuucagagccaccagaauu

SEQ ID NO: 20867 - RNA, 1112 nt, Artificial Sequence
  mRNA product Design g-4 comprising derived and/or modified sequence from HRSV(Memphis-37)__AIY60637.1__P (opt4)
gggagacuccugucgggcggaaguaggaggaguagaguuuaaaaacaguacucuuuuuccgguucgggacguaguugaagcaacgacaagccggauaaccgcucuugagacaggaagcuuaccauggagaaguucgcccccgaguuccacggcgaggacgccaacaacagagccaccaaguuccuggagagcaucaagggcaaguucaccagccccaaggaccccaagaagaaggacagcaucaucagcgugaacagcaucgacaucgaggugaccaaggagagccccaucaccagcaacagcaccaucaucaaccccaccaacgagaccgacgacaccgccggcaacaagcccaacuaccagagaaagccccuggugagcuucaaggaggaccccacccccagcgacaaccccuucagcaagcuguacaaggagaccaucgagaccuucgacaacaacgaggaggagagcagcuacagcuacgaggagaucaacgaccagaccaacgacaacaucaccgccagacuggacagaaucgacgagaagcugagcgagauccugggcaugcugcacacccuggugguggccagcgccggccccaccagcgccagagacggcaucagagacgccauggugggccugagagaggagaugaucgagaagaucagaaccgaggcccugaugaccaacgacagacuggaggccauggccagacugagaaacgaggagagcgagaagauggccaaggacaccagcgacgaggugagccugaaccccaccagcgagaagcugaacaaccugcuggagggcaacgacagcgacaacgaccugagccuggaggacuucugaggacuaguaauaaggaaacuguaugaaugucugugggcaggaagugaagagauccuucuguaaagguuuuuggaauuaugucugcugaauaauaaacuuuuuugaaauaauaaaucugguagaaaaaugagaucuaaaaaaaaaaaaaaaaaaaaaaaaaaaaaaaaaaaaaaaaaaaaaaaaaaaaaaaaaaaaaaaaugcaucccccccccccccccccccccccccccccccaaaggcucuuuucagagccaccagaauu

SEQ ID NO: 20868 - RNA, 1112 nt, Artificial Sequence
  mRNA product Design g-4 comprising derived and/or modified sequence from HRSV(Memphis-37)__AIY60637.1__P (opt5)
gggagacuccugucgggcggaaguaggaggaguagaguuuaaaaacaguacucuuuuuccgguucgggacguaguugaagcaacgacaagccggauaaccgcucuugagacaggaagcuuaccauggagaaguucgcccccgaauuucacggcgaggacgcuaacaauagagccaccaaauuccuggaaagcaucaaggggaaauuuacauccccuaaggauccgaaaaagaaggacucuauuaucagcgugaacuccauugauaucgaggucacgaaagaaucucccauuaccagcaauuccacaaucaucaacccuaccaaugagacagacgauaccgcgggaaacaagcccaauuaccagcggaaaccucucguuucuuucaaggaggaccccacaccuagcgauaacccguuuuccaaacuguauaaggaaaccauugagacguucgacaauaacgaagaggagagcucuuacuccuaugaagagaucaaugaucaaaccaacgacaauauuacagcucgccuugauagaaucgacgaaaagcugagcgagauucucggcaugcugcauacccuugugguggccucugccgggcccacauccgcucgggauggaauccgcgacgccauggucggccugagagaagagaugauugagaaaauccggaccgaagcucucaugacgaacgaccgccuggaggccauggcgagacugcggaaugaagagagcgaaaagauggccaaagauacaucugacgaggugucccucaacccuaccagcgagaagcugaacaaucuucuggaagggaacgauuccgacaaugaucucucucuggaggacuuuugaggacuaguaauaaggaaacuguaugaaugucugugggcaggaagugaagagauccuucuguaaagguuuuuggaauuaugucugcugaauaauaaacuuuuuugaaauaauaaaucugguagaaaaaugagaucuaaaaaaaaaaaaaaaaaaaaaaaaaaaaaaaaaaaaaaaaaaaaaaaaaaaaaaaaaaaaaaaaugcaucccccccccccccccccccccccccccccccaaaggcucuuuucagagccaccagaauu

SEQ ID NO: 20869 - RNA, 1112 nt, Artificial Sequence
  mRNA product Design g-4 comprising derived and/or modified sequence from HRSV(Memphis-37)__AIY60637.1__P (opt6)
gggagacuccugucgggcggaaguaggaggaguagaguuuaaaaacaguacucuuuuuccgguucgggacguaguugaagcaacgacaagccggauaaccgcucuugagacaggaagcuuaccauggaaaaauucgcaccagaauuccacggagaagacgcaaacaacagagcaacaaaauuccuagaaucaauaaaaggaaaauucacaagcccaaaagaucccaaaaaaaaagacucaaucauaagcguaaacucaauagauauagaaguaacaaaagaaaguccaauaacaagcaacaguacaauaauaaacccaacaaaugaaacagacgauacagcaggcaacaaaccaaacuaccaaagaaaaccgcuaguaaguuucaaagaagacccaacaccaagcgauaacccauuuucaaaauuauacaaagaaacaauagaaacauucgacaacaacgaagaagaaagcucauacucauacgaagaaauaaacgaccaaacaaacgacaacauaacagcgagauuagacagaauagacgaaaaacuaucagaaauacuaggcauguuacacacauuaguaguagcaagcgcaggaccaacaucagcaagagacggaauccgagacgcaaugguaggacuaagagaagaaaugauagaaaaaauaagaacagaagcacuaaugacaaacgacagacuagaagccauggcaagacuaagaaacgaagaaucagaaaaaauggcaaaagacacaucagacgaaguaucacuaaacccaacaagcgaaaaacuaaacaaccuauuagaaggaaacgacagcgacaacgaccuaucacucgaagacuucuaaggacuaguaauaaggaaacuguaugaaugucugugggcaggaagugaagagauccuucuguaaagguuuuuggaauuaugucugcugaauaauaaacuuuuuugaaauaauaaaucugguagaaaaaugagaucuaaaaaaaaaaaaaaaaaaaaaaaaaaaaaaaaaaaaaaaaaaaaaaaaaaaaaaaaaaaaaaaaugcaucccccccccccccccccccccccccccccccaaaggcucuuuucagagccaccagaauu

SEQ ID NO: 20870 - RNA, 1112 nt, Artificial Sequence
  mRNA product Design g-4 comprising derived and/or modified sequence from HRSV(Memphis-37)__AIY60637.1__P (opt11)
gggagacuccugucgggcggaaguaggaggaguagaguuuaaaaacaguacucuuuuuccgguucgggacguaguugaagcaacgacaagccggauaaccgcucuugagacaggaagcuuaccauggaaaaauucgccccagaauuucacggcgaagacgccaacaaccgagccaccaaauuccucgaaucaauaaaaggcaaauucacaucccccaaagaccccaaaaaaaaagacucgaucaucuccgugaacucaaucgacauagaagucaccaaagaaagccccaucaccuccaacagcaccaucaucaaccccacaaacgaaacagacgacaccgccggcaacaaaccaaacuaccaacgaaaaccccucgucagcuucaaagaagaccccacaccaagcgacaaccccuucuccaaacucuacaaagaaacaauagaaaccuucgacaacaacgaagaagaaagcucguacucauacgaagaaaucaacgaccaaaccaacgacaacaucaccgcccgccucgaccgcaucgacgaaaaacucuccgaaauccucggaaugcuccacacacucgucgucgccagcgccggccccaccucagcccgggacggcauccgcgacgccauggugggccuccgcgaggaaaugaucgaaaaaauccgcacagaagcccucaugaccaacgaccgccucgaagccauggcccgccuccgcaacgaagaauccgaaaaaauggccaaagacaccuccgacgaagucucacuaaaccccaccuccgaaaaacuaaacaaccuccuagaaggcaacgacagcgacaacgaccucucccuagaagacuucuaaggacuaguaauaaggaaacuguaugaaugucugugggcaggaagugaagagauccuucuguaaagguuuuuggaauuaugucugcugaauaauaaacuuuuuugaaauaauaaaucugguagaaaaaugagaucuaaaaaaaaaaaaaaaaaaaaaaaaaaaaaaaaaaaaaaaaaaaaaaaaaaaaaaaaaaaaaaaaugcaucccccccccccccccccccccccccccccccaaaggcucuuuucagagccaccagaauu

SEQ ID NO: 20871 - RNA, 1088 nt, Artificial Sequence
  mRNA product Design g-5 comprising derived and/or modified sequence from HRSV(Memphis-37)__AIY60637.1__P (wt)
gggagacccgugacccggaaguuguacggcuacgcgacuuucccucccacaaacccucgcgcccuuccuuuccuacuugggcccggcagaaagcuuaccauggaaaaguuugcuccugaauuccauggagaagacgcaaacaacagagccacuaaauuccuagaaucaauaaagggcaaauucacaucaccuaaagaucccaagaaaaaagauaguaucauaucugucaacucaauagauauagaaguaaccaaagaaagcccuauaacuucaaauucaaccauuauaaacccuacaaaugagacagaugauacugcagggaacaagcccaauuaucaaagaaaaccacuagugaguuucaaagaagacccuacgccaagugauaaucccuuuucaaaacuauacaaagaaaccauagaaacauuugauaacaaugaagaagaaucuagcuauucauaugaagaaauaaaugaucagacaaacgauaauauaacagcaagauuagauaggauugaugaaaaauuaagugaaauacuaggaaugcuucacacacuaguaguagcaagugcaggaccuacaucugcucgggaugguauaagagaugccaugguugguuuaagagaagaaaugauagaaaaaaucagaacugaagcauugaugaccaaugauagauuagaagcuauggcaagacucaggaaugaggaaagugaaaagauggcaaaagacacaucagaugaagugucucucaauccaacaucagagaaauugaacaaccuguuggaaggaaaugauagugauaaugaucuaucacuugaagauuucugaggacuaguaauaaggaaacuguaugaaugucugugggcaggaagugaagagauccuucuguaaagguuuuuggaauuaugucugcugaauaauaaacuuuuuugaaauaauaaaucugguagaaaaaugagaucuaaaaaaaaaaaaaaaaaaaaaaaaaaaaaaaaaaaaaaaaaaaaaaaaaaaaaaaaaaaaaaaaugcaucccccccccccccccccccccccccccccccaaaggcucuuuucagagccaccagaauu

SEQ ID NO: 20872 - RNA, 1088 nt, Artificial Sequence
  mRNA product Design g-5 comprising derived and/or modified sequence from HRSV(Memphis-37)__AIY60637.1__P (opt1)
gggagacccgugacccggaaguuguacggcuacgcgacuuucccucccacaaacccucgcgcccuuccuuuccuacuugggcccggcagaaagcuuaccauggagaaguucgcccccgaguuccacggcgaggacgccaacaaccgcgcgaccaaguuccuggagagcaucaaggggaaguucaccuccccgaaggaccccaagaagaaggacagcaucaucuccgugaacagcaucgacaucgaggucacgaaggagucccccaucaccagcaacuccaccaucaucaaccccaccaacgagacggacgacaccgccggcaacaagccgaacuaccagcggaagccccucgugagcuucaaggaggaccccacccccuccgacaacccguucagcaagcuguacaaggagaccaucgagacguucgacaacaacgaggaggaguccagcuacuccuacgaggagaucaacgaccagaccaacgacaacaucaccgcccgccuggaccggaucgacgagaagcucagcgagauccuggggaugcugcacacccucguggucgccuccgccggccccacgagcgcgcgcgacgggauccgggacgccauggugggccugcgcgaggagaugaucgagaagauccggaccgaggcccugaugaccaacgaccgccucgaggccauggcgcggcugcgcaacgaggaguccgagaagauggccaaggacaccagcgacgaggugucccugaaccccacgagcgagaagcucaacaaccugcuggagggcaacgacagcgacaacgaccucucccuggaggacuucugaggacuaguaauaaggaaacuguaugaaugucugugggcaggaagugaagagauccuucuguaaagguuuuuggaauuaugucugcugaauaauaaacuuuuuugaaauaauaaaucugguagaaaaaugagaucuaaaaaaaaaaaaaaaaaaaaaaaaaaaaaaaaaaaaaaaaaaaaaaaaaaaaaaaaaaaaaaaaugcaucccccccccccccccccccccccccccccccaaaggcucuuuucagagccaccagaauu

SEQ ID NO: 20873 - RNA, 1088 nt, Artificial Sequence
  mRNA product Design g-5 comprising derived and/or modified sequence from HRSV(Memphis-37)__AIY60637.1__P (opt2)
gggagacccgugacccggaaguuguacggcuacgcgacuuucccucccacaaacccucgcgcccuuccuuuccuacuugggcccggcagaaagcuuaccauggagaaguucgcccccgaguuccacggcgaggacgccaacaaccgcgccaccaaguuccucgaguccaucaagggcaaguucaccucccccaaggaccccaagaagaaggacuccaucaucuccgucaacuccaucgacaucgaggucaccaaggagucccccaucaccuccaacuccaccaucaucaaccccaccaacgagaccgacgacaccgccggcaacaagcccaacuaccagcgcaagccccucgucuccuucaaggaggaccccacccccuccgacaaccccuucuccaagcucuacaaggagaccaucgagaccuucgacaacaacgaggaggaguccuccuacuccuacgaggagaucaacgaccagaccaacgacaacaucaccgcccgccucgaccgcaucgacgagaagcucuccgagauccucggcaugcuccacacccucgucgucgccuccgccggccccaccuccgcccgcgacggcauccgcgacgccauggucggccuccgcgaggagaugaucgagaagauccgcaccgaggcccucaugaccaacgaccgccucgaggccauggcccgccuccgcaacgaggaguccgagaagauggccaaggacaccuccgacgaggucucccucaaccccaccuccgagaagcucaacaaccuccucgagggcaacgacuccgacaacgaccucucccucgaggacuucugaggacuaguaauaaggaaacuguaugaaugucugugggcaggaagugaagagauccuucuguaaagguuuuuggaauuaugucugcugaauaauaaacuuuuuugaaauaauaaaucugguagaaaaaugagaucuaaaaaaaaaaaaaaaaaaaaaaaaaaaaaaaaaaaaaaaaaaaaaaaaaaaaaaaaaaaaaaaaugcaucccccccccccccccccccccccccccccccaaaggcucuuuucagagccaccagaauu

SEQ ID NO: 20874 - RNA, 1088 nt, Artificial Sequence
  mRNA product Design g-5 comprising derived and/or modified sequence from HRSV(Memphis-37)__AIY60637.1__P (opt3)
gggagacccgugacccggaaguuguacggcuacgcgacuuucccucccacaaacccucgcgcccuuccuuuccuacuugggcccggcagaaagcuuaccauggagaaguucgcccccgaauuucacggcgaggacgcuaacaauagagcaaccaaauuccuggaaagcaucaaggggaaauuuacauccccuaaggauccgaaaaagaaggacucuauuauaucagugaacaguaucgauauugaggucacuaaagaaagcccaaucacguccaauucuaccauuaucaaccccacaaaugagacugacgauaccgccggaaacaagccuaauuaccagaggaaaccacucguuucguucaaggaggaccccacaccuucagauaacccauuuagcaaacuuuauaaggaaaccauagagacuuucgacaauaacgaagaggagaguuccuacucuuaugaagagaucaaugaucaaacaaacgacaauauuaccgcgcggcuggaucgcaucgacgaaaaguugagcgagauuuuagguaugcugcauacgcuagugguagcuuccgccggccccacuucagcacgagaugggauccgugacgccauggugggacucagagaagagaugauagagaaaauuaggaccgaagcucugaugacaaacgaccggcuugaggcaauggcccgccugagaaaugaagagagugaaaagauggcuaaagauacuagcgacgaggucucuuugaacccuaccuccgagaagcucaacaaucugcuggaaggcaacgauucagacaaugaucucagcuuagaggacuuuugaggacuaguaauaaggaaacuguaugaaugucugugggcaggaagugaagagauccuucuguaaagguuuuuggaauuaugucugcugaauaauaaacuuuuuugaaauaauaaaucugguagaaaaaugagaucuaaaaaaaaaaaaaaaaaaaaaaaaaaaaaaaaaaaaaaaaaaaaaaaaaaaaaaaaaaaaaaaaugcaucccccccccccccccccccccccccccccccaaaggcucuuuucagagccaccagaauu

SEQ ID NO: 20875 - RNA, 1088 nt, Artificial Sequence
  mRNA product Design g-5 comprising derived and/or modified sequence from HRSV(Memphis-37)__AIY60637.1__P (opt4)
gggagacccgugacccggaaguuguacggcuacgcgacuuucccucccacaaacccucgcgcccuuccuuuccuacuugggcccggcagaaagcuuaccauggagaaguucgcccccgaguuccacggcgaggacgccaacaacagagccaccaaguuccuggagagcaucaagggcaaguucaccagccccaaggaccccaagaagaaggacagcaucaucagcgugaacagcaucgacaucgaggugaccaaggagagccccaucaccagcaacagcaccaucaucaaccccaccaacgagaccgacgacaccgccggcaacaagcccaacuaccagagaaagccccuggugagcuucaaggaggaccccacccccagcgacaaccccuucagcaagcuguacaaggagaccaucgagaccuucgacaacaacgaggaggagagcagcuacagcuacgaggagaucaacgaccagaccaacgacaacaucaccgccagacuggacagaaucgacgagaagcugagcgagauccugggcaugcugcacacccuggugguggccagcgccggccccaccagcgccagagacggcaucagagacgccauggugggccugagagaggagaugaucgagaagaucagaaccgaggcccugaugaccaacgacagacuggaggccauggccagacugagaaacgaggagagcgagaagauggccaaggacaccagcgacgaggugagccugaaccccaccagcgagaagcugaacaaccugcuggagggcaacgacagcgacaacgaccugagccuggaggacuucugaggacuaguaauaaggaaacuguaugaaugucugugggcaggaagugaagagauccuucuguaaagguuuuuggaauuaugucugcugaauaauaaacuuuuuugaaauaauaaaucugguagaaaaaugagaucuaaaaaaaaaaaaaaaaaaaaaaaaaaaaaaaaaaaaaaaaaaaaaaaaaaaaaaaaaaaaaaaaugcaucccccccccccccccccccccccccccccccaaaggcucuuuucagagccaccagaauu

SEQ ID NO: 20876 - RNA, 1088 nt, Artificial Sequence
  mRNA product Design g-5 comprising derived and/or modified sequence from HRSV(Memphis-37)__AIY60637.1__P (opt5)
gggagacccgugacccggaaguuguacggcuacgcgacuuucccucccacaaacccucgcgcccuuccuuuccuacuugggcccggcagaaagcuuaccauggagaaguucgcccccgaauuucacggcgaggacgcuaacaauagagccaccaaauuccuggaaagcaucaaggggaaauuuacauccccuaaggauccgaaaaagaaggacucuauuaucagcgugaacuccauugauaucgaggucacgaaagaaucucccauuaccagcaauuccacaaucaucaacccuaccaaugagacagacgauaccgcgggaaacaagcccaauuaccagcggaaaccucucguuucuuucaaggaggaccccacaccuagcgauaacccguuuuccaaacuguauaaggaaaccauugagacguucgacaauaacgaagaggagagcucuuacuccuaugaagagaucaaugaucaaaccaacgacaauauuacagcucgccuugauagaaucgacgaaaagcugagcgagauucucggcaugcugcauacccuugugguggccucugccgggcccacauccgcucgggauggaauccgcgacgccauggucggccugagagaagagaugauugagaaaauccggaccgaagcucucaugacgaacgaccgccuggaggccauggcgagacugcggaaugaagagagcgaaaagauggccaaagauacaucugacgaggugucccucaacccuaccagcgagaagcugaacaaucuucuggaagggaacgauuccgacaaugaucucucucuggaggacuuuugaggacuaguaauaaggaaacuguaugaaugucugugggcaggaagugaagagauccuucuguaaagguuuuuggaauuaugucugcugaauaauaaacuuuuuugaaauaauaaaucugguagaaaaaugagaucuaaaaaaaaaaaaaaaaaaaaaaaaaaaaaaaaaaaaaaaaaaaaaaaaaaaaaaaaaaaaaaaaugcaucccccccccccccccccccccccccccccccaaaggcucuuuucagagccaccagaauu

SEQ ID NO: 20877 - RNA, 1088 nt, Artificial Sequence
  mRNA product Design g-5 comprising derived and/or modified sequence from HRSV(Memphis-37)__AIY60637.1__P (opt6)
gggagacccgugacccggaaguuguacggcuacgcgacuuucccucccacaaacccucgcgcccuuccuuuccuacuugggcccggcagaaagcuuaccauggaaaaauucgcaccagaauuccacggagaagacgcaaacaacagagcaacaaaauuccuagaaucaauaaaaggaaaauucacaagcccaaaagaucccaaaaaaaaagacucaaucauaagcguaaacucaauagauauagaaguaacaaaagaaaguccaauaacaagcaacaguacaauaauaaacccaacaaaugaaacagacgauacagcaggcaacaaaccaaacuaccaaagaaaaccgcuaguaaguuucaaagaagacccaacaccaagcgauaacccauuuucaaaauuauacaaagaaacaauagaaacauucgacaacaacgaagaagaaagcucauacucauacgaagaaauaaacgaccaaacaaacgacaacauaacagcgagauuagacagaauagacgaaaaacuaucagaaauacuaggcauguuacacacauuaguaguagcaagcgcaggaccaacaucagcaagagacggaauccgagacgcaaugguaggacuaagagaagaaaugauagaaaaaauaagaacagaagcacuaaugacaaacgacagacuagaagccauggcaagacuaagaaacgaagaaucagaaaaaauggcaaaagacacaucagacgaaguaucacuaaacccaacaagcgaaaaacuaaacaaccuauuagaaggaaacgacagcgacaacgaccuaucacucgaagacuucuaaggacuaguaauaaggaaacuguaugaaugucugugggcaggaagugaagagauccuucuguaaagguuuuuggaauuaugucugcugaauaauaaacuuuuuugaaauaauaaaucugguagaaaaaugagaucuaaaaaaaaaaaaaaaaaaaaaaaaaaaaaaaaaaaaaaaaaaaaaaaaaaaaaaaaaaaaaaaaugcaucccccccccccccccccccccccccccccccaaaggcucuuuucagagccaccagaauu

SEQ ID NO: 20878 - RNA, 1088 nt, Artificial Sequence
  mRNA product Design g-5 comprising derived and/or modified sequence from HRSV(Memphis-37)__AIY60637.1__P (opt11)
gggagacccgugacccggaaguuguacggcuacgcgacuuucccucccacaaacccucgcgcccuuccuuuccuacuugggcccggcagaaagcuuaccauggaaaaauucgccccagaauuucacggcgaagacgccaacaaccgagccaccaaauuccucgaaucaauaaaaggcaaauucacaucccccaaagaccccaaaaaaaaagacucgaucaucuccgugaacucaaucgacauagaagucaccaaagaaagccccaucaccuccaacagcaccaucaucaaccccacaaacgaaacagacgacaccgccggcaacaaaccaaacuaccaacgaaaaccccucgucagcuucaaagaagaccccacaccaagcgacaaccccuucuccaaacucuacaaagaaacaauagaaaccuucgacaacaacgaagaagaaagcucguacucauacgaagaaaucaacgaccaaaccaacgacaacaucaccgcccgccucgaccgcaucgacgaaaaacucuccgaaauccucggaaugcuccacacacucgucgucgccagcgccggccccaccucagcccgggacggcauccgcgacgccauggugggccuccgcgaggaaaugaucgaaaaaauccgcacagaagcccucaugaccaacgaccgccucgaagccauggcccgccuccgcaacgaagaauccgaaaaaauggccaaagacaccuccgacgaagucucacuaaaccccaccuccgaaaaacuaaacaaccuccuagaaggcaacgacagcgacaacgaccucucccuagaagacuucuaaggacuaguaauaaggaaacuguaugaaugucugugggcaggaagugaagagauccuucuguaaagguuuuuggaauuaugucugcugaauaauaaacuuuuuugaaauaauaaaucugguagaaaaaugagaucuaaaaaaaaaaaaaaaaaaaaaaaaaaaaaaaaaaaaaaaaaaaaaaaaaaaaaaaaaaaaaaaaugcaucccccccccccccccccccccccccccccccaaaggcucuuuucagagccaccagaauu

SEQ ID NO: 20879 - RNA, 1104 nt, Artificial Sequence
  mRNA product Design h-1 comprising derived and/or modified sequence from HRSV(Memphis-37)__AIY60637.1__P (wt)
gggagacccgugacccggaaguuguacggcuacgcgacuuucccucccacaaacccucgcgcccuuccuuuccuacuugggcccggcagaaagcuuaccauggaaaaguuugcuccugaauuccauggagaagacgcaaacaacagagccacuaaauuccuagaaucaauaaagggcaaauucacaucaccuaaagaucccaagaaaaaagauaguaucauaucugucaacucaauagauauagaaguaaccaaagaaagcccuauaacuucaaauucaaccauuauaaacccuacaaaugagacagaugauacugcagggaacaagcccaauuaucaaagaaaaccacuagugaguuucaaagaagacccuacgccaagugauaaucccuuuucaaaacuauacaaagaaaccauagaaacauuugauaacaaugaagaagaaucuagcuauucauaugaagaaauaaaugaucagacaaacgauaauauaacagcaagauuagauaggauugaugaaaaauuaagugaaauacuaggaaugcuucacacacuaguaguagcaagugcaggaccuacaucugcucgggaugguauaagagaugccaugguugguuuaagagaagaaaugauagaaaaaaucagaacugaagcauugaugaccaaugauagauuagaagcuauggcaagacucaggaaugaggaaagugaaaagauggcaaaagacacaucagaugaagugucucucaauccaacaucagagaaauugaacaaccuguuggaaggaaaugauagugauaaugaucuaucacuugaagauuucugaggacuaguacuggcugcaucucccuuuccucuguccuccauccuucucccaggauggugaagggggaccugguacccagugauccccaccccaggauccuaaaucaugacuuaccugcuaauaaaaacucauuggaaaagugagaagaucuaaaaaaaaaaaaaaaaaaaaaaaaaaaaaaaaaaaaaaaaaaaaaaaaaaaaaaaaaaaaaaaaugcaucccccccccccccccccccccccccccccccaaaggcucuuuucagagccaccagaauu

SEQ ID NO: 20880 - RNA, 1104 nt, Artificial Sequence
  mRNA product Design h-1 comprising derived and/or modified sequence from HRSV(Memphis-37)__AIY60637.1__P (opt1)
gggagacccgugacccggaaguuguacggcuacgcgacuuucccucccacaaacccucgcgcccuuccuuuccuacuugggcccggcagaaagcuuaccauggagaaguucgcccccgaguuccacggcgaggacgccaacaaccgcgcgaccaaguuccuggagagcaucaaggggaaguucaccuccccgaaggaccccaagaagaaggacagcaucaucuccgugaacagcaucgacaucgaggucacgaaggagucccccaucaccagcaacuccaccaucaucaaccccaccaacgagacggacgacaccgccggcaacaagccgaacuaccagcggaagccccucgugagcuucaaggaggaccccacccccuccgacaacccguucagcaagcuguacaaggagaccaucgagacguucgacaacaacgaggaggaguccagcuacuccuacgaggagaucaacgaccagaccaacgacaacaucaccgcccgccuggaccggaucgacgagaagcucagcgagauccuggggaugcugcacacccucguggucgccuccgccggccccacgagcgcgcgcgacgggauccgggacgccauggugggccugcgcgaggagaugaucgagaagauccggaccgaggcccugaugaccaacgaccgccucgaggccauggcgcggcugcgcaacgaggaguccgagaagauggccaaggacaccagcgacgaggugucccugaaccccacgagcgagaagcucaacaaccugcuggagggcaacgacagcgacaacgaccucucccuggaggacuucugaggacuaguacuggcugcaucucccuuuccucuguccuccauccuucucccaggauggugaagggggaccugguacccagugauccccaccccaggauccuaaaucaugacuuaccugcuaauaaaaacucauuggaaaagugagaagaucuaaaaaaaaaaaaaaaaaaaaaaaaaaaaaaaaaaaaaaaaaaaaaaaaaaaaaaaaaaaaaaaaugcaucccccccccccccccccccccccccccccccaaaggcucuuuucagagccaccagaauu

SEQ ID NO: 20881 - RNA, 1104 nt, Artificial Sequence
  mRNA product Design h-1 comprising derived and/or modified sequence from HRSV(Memphis-37)__AIY60637.1__P (opt2)
gggagacccgugacccggaaguuguacggcuacgcgacuuucccucccacaaacccucgcgcccuuccuuuccuacuugggcccggcagaaagcuuaccauggagaaguucgcccccgaguuccacggcgaggacgccaacaaccgcgccaccaaguuccucgaguccaucaagggcaaguucaccucccccaaggaccccaagaagaaggacuccaucaucuccgucaacuccaucgacaucgaggucaccaaggagucccccaucaccuccaacuccaccaucaucaaccccaccaacgagaccgacgacaccgccggcaacaagcccaacuaccagcgcaagccccucgucuccuucaaggaggaccccacccccuccgacaaccccuucuccaagcucuacaaggagaccaucgagaccuucgacaacaacgaggaggaguccuccuacuccuacgaggagaucaacgaccagaccaacgacaacaucaccgcccgccucgaccgcaucgacgagaagcucuccgagauccucggcaugcuccacacccucgucgucgccuccgccggccccaccuccgcccgcgacggcauccgcgacgccauggucggccuccgcgaggagaugaucgagaagauccgcaccgaggcccucaugaccaacgaccgccucgaggccauggcccgccuccgcaacgaggaguccgagaagauggccaaggacaccuccgacgaggucucccucaaccccaccuccgagaagcucaacaaccuccucgagggcaacgacuccgacaacgaccucucccucgaggacuucugaggacuaguacuggcugcaucucccuuuccucuguccuccauccuucucccaggauggugaagggggaccugguacccagugauccccaccccaggauccuaaaucaugacuuaccugcuaauaaaaacucauuggaaaagugagaagaucuaaaaaaaaaaaaaaaaaaaaaaaaaaaaaaaaaaaaaaaaaaaaaaaaaaaaaaaaaaaaaaaaugcaucccccccccccccccccccccccccccccccaaaggcucuuuucagagccaccagaauu

SEQ ID NO: 20882 - RNA, 1104 nt, Artificial Sequence
  mRNA product Design h-1 comprising derived and/or modified sequence from HRSV(Memphis-37)__AIY60637.1__P (opt3)
gggagacccgugacccggaaguuguacggcuacgcgacuuucccucccacaaacccucgcgcccuuccuuuccuacuugggcccggcagaaagcuuaccauggagaaguucgcccccgaauuucacggcgaggacgcuaacaauagagcaaccaaauuccuggaaagcaucaaggggaaauuuacauccccuaaggauccgaaaaagaaggacucuauuauaucagugaacaguaucgauauugaggucacuaaagaaagcccaaucacguccaauucuaccauuaucaaccccacaaaugagacugacgauaccgccggaaacaagccuaauuaccagaggaaaccacucguuucguucaaggaggaccccacaccuucagauaacccauuuagcaaacuuuauaaggaaaccauagagacuuucgacaauaacgaagaggagaguuccuacucuuaugaagagaucaaugaucaaacaaacgacaauauuaccgcgcggcuggaucgcaucgacgaaaaguugagcgagauuuuagguaugcugcauacgcuagugguagcuuccgccggccccacuucagcacgagaugggauccgugacgccauggugggacucagagaagagaugauagagaaaauuaggaccgaagcucugaugacaaacgaccggcuugaggcaauggcccgccugagaaaugaagagagugaaaagauggcuaaagauacuagcgacgaggucucuuugaacccuaccuccgagaagcucaacaaucugcuggaaggcaacgauucagacaaugaucucagcuuagaggacuuuugaggacuaguacuggcugcaucucccuuuccucuguccuccauccuucucccaggauggugaagggggaccugguacccagugauccccaccccaggauccuaaaucaugacuuaccugcuaauaaaaacucauuggaaaagugagaagaucuaaaaaaaaaaaaaaaaaaaaaaaaaaaaaaaaaaaaaaaaaaaaaaaaaaaaaaaaaaaaaaaaugcaucccccccccccccccccccccccccccccccaaaggcucuuuucagagccaccagaauu

SEQ ID NO: 20883 - RNA, 1104 nt, Artificial Sequence
  mRNA product Design h-1 comprising derived and/or modified sequence from HRSV(Memphis-37)__AIY60637.1__P (opt4)
gggagacccgugacccggaaguuguacggcuacgcgacuuucccucccacaaacccucgcgcccuuccuuuccuacuugggcccggcagaaagcuuaccauggagaaguucgcccccgaguuccacggcgaggacgccaacaacagagccaccaaguuccuggagagcaucaagggcaaguucaccagccccaaggaccccaagaagaaggacagcaucaucagcgugaacagcaucgacaucgaggugaccaaggagagccccaucaccagcaacagcaccaucaucaaccccaccaacgagaccgacgacaccgccggcaacaagcccaacuaccagagaaagccccuggugagcuucaaggaggaccccacccccagcgacaaccccuucagcaagcuguacaaggagaccaucgagaccuucgacaacaacgaggaggagagcagcuacagcuacgaggagaucaacgaccagaccaacgacaacaucaccgccagacuggacagaaucgacgagaagcugagcgagauccugggcaugcugcacacccuggugguggccagcgccggccccaccagcgccagagacggcaucagagacgccauggugggccugagagaggagaugaucgagaagaucagaaccgaggcccugaugaccaacgacagacuggaggccauggccagacugagaaacgaggagagcgagaagauggccaaggacaccagcgacgaggugagccugaaccccaccagcgagaagcugaacaaccugcuggagggcaacgacagcgacaacgaccugagccuggaggacuucugaggacuaguacuggcugcaucucccuuuccucuguccuccauccuucucccaggauggugaagggggaccugguacccagugauccccaccccaggauccuaaaucaugacuuaccugcuaauaaaaacucauuggaaaagugagaagaucuaaaaaaaaaaaaaaaaaaaaaaaaaaaaaaaaaaaaaaaaaaaaaaaaaaaaaaaaaaaaaaaaugcaucccccccccccccccccccccccccccccccaaaggcucuuuucagagccaccagaauu

SEQ ID NO: 20884 - RNA, 1104 nt, Artificial Sequence
  mRNA product Design h-1 comprising derived and/or modified sequence from HRSV(Memphis-37)__AIY60637.1__P (opt5)
gggagacccgugacccggaaguuguacggcuacgcgacuuucccucccacaaacccucgcgcccuuccuuuccuacuugggcccggcagaaagcuuaccauggagaaguucgcccccgaauuucacggcgaggacgcuaacaauagagccaccaaauuccuggaaagcaucaaggggaaauuuacauccccuaaggauccgaaaaagaaggacucuauuaucagcgugaacuccauugauaucgaggucacgaaagaaucucccauuaccagcaauuccacaaucaucaacccuaccaaugagacagacgauaccgcgggaaacaagcccaauuaccagcggaaaccucucguuucuuucaaggaggaccccacaccuagcgauaacccguuuuccaaacuguauaaggaaaccauugagacguucgacaauaacgaagaggagagcucuuacuccuaugaagagaucaaugaucaaaccaacgacaauauuacagcucgccuugauagaaucgacgaaaagcugagcgagauucucggcaugcugcauacccuugugguggccucugccgggcccacauccgcucgggauggaauccgcgacgccauggucggccugagagaagagaugauugagaaaauccggaccgaagcucucaugacgaacgaccgccuggaggccauggcgagacugcggaaugaagagagcgaaaagauggccaaagauacaucugacgaggugucccucaacccuaccagcgagaagcugaacaaucuucuggaagggaacgauuccgacaaugaucucucucuggaggacuuuugaggacuaguacuggcugcaucucccuuuccucuguccuccauccuucucccaggauggugaagggggaccugguacccagugauccccaccccaggauccuaaaucaugacuuaccugcuaauaaaaacucauuggaaaagugagaagaucuaaaaaaaaaaaaaaaaaaaaaaaaaaaaaaaaaaaaaaaaaaaaaaaaaaaaaaaaaaaaaaaaugcaucccccccccccccccccccccccccccccccaaaggcucuuuucagagccaccagaauu

SEQ ID NO: 20885 - RNA, 1104 nt, Artificial Sequence
  mRNA product Design h-1 comprising derived and/or modified sequence from HRSV(Memphis-37)__AIY60637.1__P (opt6)
gggagacccgugacccggaaguuguacggcuacgcgacuuucccucccacaaacccucgcgcccuuccuuuccuacuugggcccggcagaaagcuuaccauggaaaaauucgcaccagaauuccacggagaagacgcaaacaacagagcaacaaaauuccuagaaucaauaaaaggaaaauucacaagcccaaaagaucccaaaaaaaaagacucaaucauaagcguaaacucaauagauauagaaguaacaaaagaaaguccaauaacaagcaacaguacaauaauaaacccaacaaaugaaacagacgauacagcaggcaacaaaccaaacuaccaaagaaaaccgcuaguaaguuucaaagaagacccaacaccaagcgauaacccauuuucaaaauuauacaaagaaacaauagaaacauucgacaacaacgaagaagaaagcucauacucauacgaagaaauaaacgaccaaacaaacgacaacauaacagcgagauuagacagaauagacgaaaaacuaucagaaauacuaggcauguuacacacauuaguaguagcaagcgcaggaccaacaucagcaagagacggaauccgagacgcaaugguaggacuaagagaagaaaugauagaaaaaauaagaacagaagcacuaaugacaaacgacagacuagaagccauggcaagacuaagaaacgaagaaucagaaaaaauggcaaaagacacaucagacgaaguaucacuaaacccaacaagcgaaaaacuaaacaaccuauuagaaggaaacgacagcgacaacgaccuaucacucgaagacuucuaaggacuaguacuggcugcaucucccuuuccucuguccuccauccuucucccaggauggugaagggggaccugguacccagugauccccaccccaggauccuaaaucaugacuuaccugcuaauaaaaacucauuggaaaagugagaagaucuaaaaaaaaaaaaaaaaaaaaaaaaaaaaaaaaaaaaaaaaaaaaaaaaaaaaaaaaaaaaaaaaugcaucccccccccccccccccccccccccccccccaaaggcucuuuucagagccaccagaauu

SEQ ID NO: 20886 - RNA, 1104 nt, Artificial Sequence
  mRNA product Design h-1 comprising derived and/or modified sequence from HRSV(Memphis-37)__AIY60637.1__P (opt11)
gggagacccgugacccggaaguuguacggcuacgcgacuuucccucccacaaacccucgcgcccuuccuuuccuacuugggcccggcagaaagcuuaccauggaaaaauucgccccagaauuucacggcgaagacgccaacaaccgagccaccaaauuccucgaaucaauaaaaggcaaauucacaucccccaaagaccccaaaaaaaaagacucgaucaucuccgugaacucaaucgacauagaagucaccaaagaaagccccaucaccuccaacagcaccaucaucaaccccacaaacgaaacagacgacaccgccggcaacaaaccaaacuaccaacgaaaaccccucgucagcuucaaagaagaccccacaccaagcgacaaccccuucuccaaacucuacaaagaaacaauagaaaccuucgacaacaacgaagaagaaagcucguacucauacgaagaaaucaacgaccaaaccaacgacaacaucaccgcccgccucgaccgcaucgacgaaaaacucuccgaaauccucggaaugcuccacacacucgucgucgccagcgccggccccaccucagcccgggacggcauccgcgacgccauggugggccuccgcgaggaaaugaucgaaaaaauccgcacagaagcccucaugaccaacgaccgccucgaagccauggcccgccuccgcaacgaagaauccgaaaaaauggccaaagacaccuccgacgaagucucacuaaaccccaccuccgaaaaacuaaacaaccuccuagaaggcaacgacagcgacaacgaccucucccuagaagacuucuaaggacuaguacuggcugcaucucccuuuccucuguccuccauccuucucccaggauggugaagggggaccugguacccagugauccccaccccaggauccuaaaucaugacuuaccugcuaauaaaaacucauuggaaaagugagaagaucuaaaaaaaaaaaaaaaaaaaaaaaaaaaaaaaaaaaaaaaaaaaaaaaaaaaaaaaaaaaaaaaaugcaucccccccccccccccccccccccccccccccaaaggcucuuuucagagccaccagaauu

SEQ ID NO: 20887 - RNA, 1320 nt, Artificial Sequence
  mRNA product Design h-2 comprising derived and/or modified sequence from HRSV(Memphis-37)__AIY60637.1__P (wt)
gggagacccgugacccggaaguuguacggcuacgcgacuuucccucccacaaacccucgcgcccuuccuuuccuacuugggcccggcagaaagcuuaccauggaaaaguuugcuccugaauuccauggagaagacgcaaacaacagagccacuaaauuccuagaaucaauaaagggcaaauucacaucaccuaaagaucccaagaaaaaagauaguaucauaucugucaacucaauagauauagaaguaaccaaagaaagcccuauaacuucaaauucaaccauuauaaacccuacaaaugagacagaugauacugcagggaacaagcccaauuaucaaagaaaaccacuagugaguuucaaagaagacccuacgccaagugauaaucccuuuucaaaacuauacaaagaaaccauagaaacauuugauaacaaugaagaagaaucuagcuauucauaugaagaaauaaaugaucagacaaacgauaauauaacagcaagauuagauaggauugaugaaaaauuaagugaaauacuaggaaugcuucacacacuaguaguagcaagugcaggaccuacaucugcucgggaugguauaagagaugccaugguugguuuaagagaagaaaugauagaaaaaaucagaacugaagcauugaugaccaaugauagauuagaagcuauggcaagacucaggaaugaggaaagugaaaagauggcaaaagacacaucagaugaagugucucucaauccaacaucagagaaauugaacaaccuguuggaaggaaaugauagugauaaugaucuaucacuugaagauuucugaggacuagugaagggaacacccaaauuuaauucagccuuaagcacaauuaauuaagagugaaacguaauuguacaagcaguuggucacccaccauagggcaugaucaacaccgcaaccuuuccuuuuucccccagugauucugaaaaaccccucuucccuucagcuugcuuagauguuccaaauuuaguaagcuuaaggcggccuacagaagaaaaagaaaaaaaaggccacaaaaguucccucucacuuucaguaaauaaaauaaaagcagcaacagaaauaaagaaauaaaugaaauucaaaaugaaauaaauauuguguugugcagcauuaaaaaaucaauaaaaauuaaaaaugagcaagaucuaaaaaaaaaaaaaaaaaaaaaaaaaaaaaaaaaaaaaaaaaaaaaaaaaaaaaaaaaaaaaaaaugcaucccccccccccccccccccccccccccccccaaaggcucuuuucagagccaccagaauu

SEQ ID NO: 20888 - RNA, 1320 nt, Artificial Sequence
  mRNA product Design h-2 comprising derived and/or modified sequence from HRSV(Memphis-37)__AIY60637.1__P (opt1)
gggagacccgugacccggaaguuguacggcuacgcgacuuucccucccacaaacccucgcgcccuuccuuuccuacuugggcccggcagaaagcuuaccauggagaaguucgcccccgaguuccacggcgaggacgccaacaaccgcgcgaccaaguuccuggagagcaucaaggggaaguucaccuccccgaaggaccccaagaagaaggacagcaucaucuccgugaacagcaucgacaucgaggucacgaaggagucccccaucaccagcaacuccaccaucaucaaccccaccaacgagacggacgacaccgccggcaacaagccgaacuaccagcggaagccccucgugagcuucaaggaggaccccacccccuccgacaacccguucagcaagcuguacaaggagaccaucgagacguucgacaacaacgaggaggaguccagcuacuccuacgaggagaucaacgaccagaccaacgacaacaucaccgcccgccuggaccggaucgacgagaagcucagcgagauccuggggaugcugcacacccucguggucgccuccgccggccccacgagcgcgcgcgacgggauccgggacgccauggugggccugcgcgaggagaugaucgagaagauccggaccgaggcccugaugaccaacgaccgccucgaggccauggcgcggcugcgcaacgaggaguccgagaagauggccaaggacaccagcgacgaggugucccugaaccccacgagcgagaagcucaacaaccugcuggagggcaacgacagcgacaacgaccucucccuggaggacuucugaggacuagugaagggaacacccaaauuuaauucagccuuaagcacaauuaauuaagagugaaacguaauuguacaagcaguuggucacccaccauagggcaugaucaacaccgcaaccuuuccuuuuucccccagugauucugaaaaaccccucuucccuucagcuugcuuagauguuccaaauuuaguaagcuuaaggcggccuacagaagaaaaagaaaaaaaaggccacaaaaguucccucucacuuucaguaaauaaaauaaaagcagcaacagaaauaaagaaauaaaugaaauucaaaaugaaauaaauauuguguugugcagcauuaaaaaaucaauaaaaauuaaaaaugagcaagaucuaaaaaaaaaaaaaaaaaaaaaaaaaaaaaaaaaaaaaaaaaaaaaaaaaaaaaaaaaaaaaaaaugcaucccccccccccccccccccccccccccccccaaaggcucuuuucagagccaccagaauu

SEQ ID NO: 20889 - RNA, 1320 nt, Artificial Sequence
  mRNA product Design h-2 comprising derived and/or modified sequence from HRSV(Memphis-37)__AIY60637.1__P (opt2)
gggagacccgugacccggaaguuguacggcuacgcgacuuucccucccacaaacccucgcgcccuuccuuuccuacuugggcccggcagaaagcuuaccauggagaaguucgcccccgaguuccacggcgaggacgccaacaaccgcgccaccaaguuccucgaguccaucaagggcaaguucaccucccccaaggaccccaagaagaaggacuccaucaucuccgucaacuccaucgacaucgaggucaccaaggagucccccaucaccuccaacuccaccaucaucaaccccaccaacgagaccgacgacaccgccggcaacaagcccaacuaccagcgcaagccccucgucuccuucaaggaggaccccacccccuccgacaaccccuucuccaagcucuacaaggagaccaucgagaccuucgacaacaacgaggaggaguccuccuacuccuacgaggagaucaacgaccagaccaacgacaacaucaccgcccgccucgaccgcaucgacgagaagcucuccgagauccucggcaugcuccacacccucgucgucgccuccgccggccccaccuccgcccgcgacggcauccgcgacgccauggucggccuccgcgaggagaugaucgagaagauccgcaccgaggcccucaugaccaacgaccgccucgaggccauggcccgccuccgcaacgaggaguccgagaagauggccaaggacaccuccgacgaggucucccucaaccccaccuccgagaagcucaacaaccuccucgagggcaacgacuccgacaacgaccucucccucgaggacuucugaggacuagugaagggaacacccaaauuuaauucagccuuaagcacaauuaauuaagagugaaacguaauuguacaagcaguuggucacccaccauagggcaugaucaacaccgcaaccuuuccuuuuucccccagugauucugaaaaaccccucuucccuucagcuugcuuagauguuccaaauuuaguaagcuuaaggcggccuacagaagaaaaagaaaaaaaaggccacaaaaguucccucucacuuucaguaaauaaaauaaaagcagcaacagaaauaaagaaauaaaugaaauucaaaaugaaauaaauauuguguugugcagcauuaaaaaaucaauaaaaauuaaaaaugagcaagaucuaaaaaaaaaaaaaaaaaaaaaaaaaaaaaaaaaaaaaaaaaaaaaaaaaaaaaaaaaaaaaaaaugcaucccccccccccccccccccccccccccccccaaaggcucuuuucagagccaccagaauu

SEQ ID NO: 20890 - RNA, 1320 nt, Artificial Sequence
  mRNA product Design h-2 comprising derived and/or modified sequence from HRSV(Memphis-37)__AIY60637.1__P (opt3)
gggagacccgugacccggaaguuguacggcuacgcgacuuucccucccacaaacccucgcgcccuuccuuuccuacuugggcccggcagaaagcuuaccauggagaaguucgcccccgaauuucacggcgaggacgcuaacaauagagcaaccaaauuccuggaaagcaucaaggggaaauuuacauccccuaaggauccgaaaaagaaggacucuauuauaucagugaacaguaucgauauugaggucacuaaagaaagcccaaucacguccaauucuaccauuaucaaccccacaaaugagacugacgauaccgccggaaacaagccuaauuaccagaggaaaccacucguuucguucaaggaggaccccacaccuucagauaacccauuuagcaaacuuuauaaggaaaccauagagacuuucgacaauaacgaagaggagaguuccuacucuuaugaagagaucaaugaucaaacaaacgacaauauuaccgcgcggcuggaucgcaucgacgaaaaguugagcgagauuuuagguaugcugcauacgcuagugguagcuuccgccggccccacuucagcacgagaugggauccgugacgccauggugggacucagagaagagaugauagagaaaauuaggaccgaagcucugaugacaaacgaccggcuugaggcaauggcccgccugagaaaugaagagagugaaaagauggcuaaagauacuagcgacgaggucucuuugaacccuaccuccgagaagcucaacaaucugcuggaaggcaacgauucagacaaugaucucagcuuagaggacuuuugaggacuagugaagggaacacccaaauuuaauucagccuuaagcacaauuaauuaagagugaaacguaauuguacaagcaguuggucacccaccauagggcaugaucaacaccgcaaccuuuccuuuuucccccagugauucugaaaaaccccucuucccuucagcuugcuuagauguuccaaauuuaguaagcuuaaggcggccuacagaagaaaaagaaaaaaaaggccacaaaaguucccucucacuuucaguaaauaaaauaaaagcagcaacagaaauaaagaaauaaaugaaauucaaaaugaaauaaauauuguguugugcagcauuaaaaaaucaauaaaaauuaaaaaugagcaagaucuaaaaaaaaaaaaaaaaaaaaaaaaaaaaaaaaaaaaaaaaaaaaaaaaaaaaaaaaaaaaaaaaugcaucccccccccccccccccccccccccccccccaaaggcucuuuucagagccaccagaauu

SEQ ID NO: 20891 - RNA, 1320 nt, Artificial Sequence
  mRNA product Design h-2 comprising derived and/or modified sequence from HRSV(Memphis-37)__AIY60637.1__P (opt4)
gggagacccgugacccggaaguuguacggcuacgcgacuuucccucccacaaacccucgcgcccuuccuuuccuacuugggcccggcagaaagcuuaccauggagaaguucgcccccgaguuccacggcgaggacgccaacaacagagccaccaaguuccuggagagcaucaagggcaaguucaccagccccaaggaccccaagaagaaggacagcaucaucagcgugaacagcaucgacaucgaggugaccaaggagagccccaucaccagcaacagcaccaucaucaaccccaccaacgagaccgacgacaccgccggcaacaagcccaacuaccagagaaagccccuggugagcuucaaggaggaccccacccccagcgacaaccccuucagcaagcuguacaaggagaccaucgagaccuucgacaacaacgaggaggagagcagcuacagcuacgaggagaucaacgaccagaccaacgacaacaucaccgccagacuggacagaaucgacgagaagcugagcgagauccugggcaugcugcacacccuggugguggccagcgccggccccaccagcgccagagacggcaucagagacgccauggugggccugagagaggagaugaucgagaagaucagaaccgaggcccugaugaccaacgacagacuggaggccauggccagacugagaaacgaggagagcgagaagauggccaaggacaccagcgacgaggugagccugaaccccaccagcgagaagcugaacaaccugcuggagggcaacgacagcgacaacgaccugagccuggaggacuucugaggacuagugaagggaacacccaaauuuaauucagccuuaagcacaauuaauuaagagugaaacguaauuguacaagcaguuggucacccaccauagggcaugaucaacaccgcaaccuuuccuuuuucccccagugauucugaaaaaccccucuucccuucagcuugcuuagauguuccaaauuuaguaagcuuaaggcggccuacagaagaaaaagaaaaaaaaggccacaaaaguucccucucacuuucaguaaauaaaauaaaagcagcaacagaaauaaagaaauaaaugaaauucaaaaugaaauaaauauuguguugugcagcauuaaaaaaucaauaaaaauuaaaaaugagcaagaucuaaaaaaaaaaaaaaaaaaaaaaaaaaaaaaaaaaaaaaaaaaaaaaaaaaaaaaaaaaaaaaaaugcaucccccccccccccccccccccccccccccccaaaggcucuuuucagagccaccagaauu

SEQ ID NO: 20892 - RNA, 1320 nt, Artificial Sequence
  mRNA product Design h-2 comprising derived and/or modified sequence from HRSV(Memphis-37)__AIY60637.1__P (opt5)
gggagacccgugacccggaaguuguacggcuacgcgacuuucccucccacaaacccucgcgcccuuccuuuccuacuugggcccggcagaaagcuuaccauggagaaguucgcccccgaauuucacggcgaggacgcuaacaauagagccaccaaauuccuggaaagcaucaaggggaaauuuacauccccuaaggauccgaaaaagaaggacucuauuaucagcgugaacuccauugauaucgaggucacgaaagaaucucccauuaccagcaauuccacaaucaucaacccuaccaaugagacagacgauaccgcgggaaacaagcccaauuaccagcggaaaccucucguuucuuucaaggaggaccccacaccuagcgauaacccguuuuccaaacuguauaaggaaaccauugagacguucgacaauaacgaagaggagagcucuuacuccuaugaagagaucaaugaucaaaccaacgacaauauuacagcucgccuugauagaaucgacgaaaagcugagcgagauucucggcaugcugcauacccuugugguggccucugccgggcccacauccgcucgggauggaauccgcgacgccauggucggccugagagaagagaugauugagaaaauccggaccgaagcucucaugacgaacgaccgccuggaggccauggcgagacugcggaaugaagagagcgaaaagauggccaaagauacaucugacgaggugucccucaacccuaccagcgagaagcugaacaaucuucuggaagggaacgauuccgacaaugaucucucucuggaggacuuuugaggacuagugaagggaacacccaaauuuaauucagccuuaagcacaauuaauuaagagugaaacguaauuguacaagcaguuggucacccaccauagggcaugaucaacaccgcaaccuuuccuuuuucccccagugauucugaaaaaccccucuucccuucagcuugcuuagauguuccaaauuuaguaagcuuaaggcggccuacagaagaaaaagaaaaaaaaggccacaaaaguucccucucacuuucaguaaauaaaauaaaagcagcaacagaaauaaagaaauaaaugaaauucaaaaugaaauaaauauuguguugugcagcauuaaaaaaucaauaaaaauuaaaaaugagcaagaucuaaaaaaaaaaaaaaaaaaaaaaaaaaaaaaaaaaaaaaaaaaaaaaaaaaaaaaaaaaaaaaaaugcaucccccccccccccccccccccccccccccccaaaggcucuuuucagagccaccagaauu

SEQ ID NO: 20893 - RNA, 1320 nt, Artificial Sequence
  mRNA product Design h-2 comprising derived and/or modified sequence from HRSV(Memphis-37)__AIY60637.1__P (opt6)
gggagacccgugacccggaaguuguacggcuacgcgacuuucccucccacaaacccucgcgcccuuccuuuccuacuugggcccggcagaaagcuuaccauggaaaaauucgcaccagaauuccacggagaagacgcaaacaacagagcaacaaaauuccuagaaucaauaaaaggaaaauucacaagcccaaaagaucccaaaaaaaaagacucaaucauaagcguaaacucaauagauauagaaguaacaaaagaaaguccaauaacaagcaacaguacaauaauaaacccaacaaaugaaacagacgauacagcaggcaacaaaccaaacuaccaaagaaaaccgcuaguaaguuucaaagaagacccaacaccaagcgauaacccauuuucaaaauuauacaaagaaacaauagaaacauucgacaacaacgaagaagaaagcucauacucauacgaagaaauaaacgaccaaacaaacgacaacauaacagcgagauuagacagaauagacgaaaaacuaucagaaauacuaggcauguuacacacauuaguaguagcaagcgcaggaccaacaucagcaagagacggaauccgagacgcaaugguaggacuaagagaagaaaugauagaaaaaauaagaacagaagcacuaaugacaaacgacagacuagaagccauggcaagacuaagaaacgaagaaucagaaaaaauggcaaaagacacaucagacgaaguaucacuaaacccaacaagcgaaaaacuaaacaaccuauuagaaggaaacgacagcgacaacgaccuaucacucgaagacuucuaaggacuagugaagggaacacccaaauuuaauucagccuuaagcacaauuaauuaagagugaaacguaauuguacaagcaguuggucacccaccauagggcaugaucaacaccgcaaccuuuccuuuuucccccagugauucugaaaaaccccucuucccuucagcuugcuuagauguuccaaauuuaguaagcuuaaggcggccuacagaagaaaaagaaaaaaaaggccacaaaaguucccucucacuuucaguaaauaaaauaaaagcagcaacagaaauaaagaaauaaaugaaauucaaaaugaaauaaauauuguguugugcagcauuaaaaaaucaauaaaaauuaaaaaugagcaagaucuaaaaaaaaaaaaaaaaaaaaaaaaaaaaaaaaaaaaaaaaaaaaaaaaaaaaaaaaaaaaaaaaugcaucccccccccccccccccccccccccccccccaaaggcucuuuucagagccaccagaauu

SEQ ID NO: 20894 - RNA, 1320 nt, Artificial Sequence
  mRNA product Design h-2 comprising derived and/or modified sequence from HRSV(Memphis-37)__AIY60637.1__P (opt11)
gggagacccgugacccggaaguuguacggcuacgcgacuuucccucccacaaacccucgcgcccuuccuuuccuacuugggcccggcagaaagcuuaccauggaaaaauucgccccagaauuucacggcgaagacgccaacaaccgagccaccaaauuccucgaaucaauaaaaggcaaauucacaucccccaaagaccccaaaaaaaaagacucgaucaucuccgugaacucaaucgacauagaagucaccaaagaaagccccaucaccuccaacagcaccaucaucaaccccacaaacgaaacagacgacaccgccggcaacaaaccaaacuaccaacgaaaaccccucgucagcuucaaagaagaccccacaccaagcgacaaccccuucuccaaacucuacaaagaaacaauagaaaccuucgacaacaacgaagaagaaagcucguacucauacgaagaaaucaacgaccaaaccaacgacaacaucaccgcccgccucgaccgcaucgacgaaaaacucuccgaaauccucggaaugcuccacacacucgucgucgccagcgccggccccaccucagcccgggacggcauccgcgacgccauggugggccuccgcgaggaaaugaucgaaaaaauccgcacagaagcccucaugaccaacgaccgccucgaagccauggcccgccuccgcaacgaagaauccgaaaaaauggccaaagacaccuccgacgaagucucacuaaaccccaccuccgaaaaacuaaacaaccuccuagaaggcaacgacagcgacaacgaccucucccuagaagacuucuaaggacuagugaagggaacacccaaauuuaauucagccuuaagcacaauuaauuaagagugaaacguaauuguacaagcaguuggucacccaccauagggcaugaucaacaccgcaaccuuuccuuuuucccccagugauucugaaaaaccccucuucccuucagcuugcuuagauguuccaaauuuaguaagcuuaaggcggccuacagaagaaaaagaaaaaaaaggccacaaaaguucccucucacuuucaguaaauaaaauaaaagcagcaacagaaauaaagaaauaaaugaaauucaaaaugaaauaaauauuguguugugcagcauuaaaaaaucaauaaaaauuaaaaaugagcaagaucuaaaaaaaaaaaaaaaaaaaaaaaaaaaaaaaaaaaaaaaaaaaaaaaaaaaaaaaaaaaaaaaaugcaucccccccccccccccccccccccccccccccaaaggcucuuuucagagccaccagaauu

SEQ ID NO: 20895 - RNA, 1100 nt, Artificial Sequence
  mRNA product Design h-3 comprising derived and/or modified sequence from HRSV(Memphis-37)__AIY60637.1__P (wt)
gggagacccgugacccggaaguuguacggcuacgcgacuuucccucccacaaacccucgcgcccuuccuuuccuacuugggcccggcagaaagcuuaccauggaaaaguuugcuccugaauuccauggagaagacgcaaacaacagagccacuaaauuccuagaaucaauaaagggcaaauucacaucaccuaaagaucccaagaaaaaagauaguaucauaucugucaacucaauagauauagaaguaaccaaagaaagcccuauaacuucaaauucaaccauuauaaacccuacaaaugagacagaugauacugcagggaacaagcccaauuaucaaagaaaaccacuagugaguuucaaagaagacccuacgccaagugauaaucccuuuucaaaacuauacaaagaaaccauagaaacauuugauaacaaugaagaagaaucuagcuauucauaugaagaaauaaaugaucagacaaacgauaauauaacagcaagauuagauaggauugaugaaaaauuaagugaaauacuaggaaugcuucacacacuaguaguagcaagugcaggaccuacaucugcucgggaugguauaagagaugccaugguugguuuaagagaagaaaugauagaaaaaaucagaacugaagcauugaugaccaaugauagauuagaagcuauggcaagacucaggaaugaggaaagugaaaagauggcaaaagacacaucagaugaagugucucucaauccaacaucagagaaauugaacaaccuguuggaaggaaaugauagugauaaugaucuaucacuugaagauuucugaggacuaguggaagcauuuuccuggcugauuaaaagaaauuacucagcuauggucaucuguuccuguuagaaggcuaugcagcauauuauauacuaugcgcauguuaugaaaugcauaauaaaaaauuuuaaaaaaucuaaaagaucuaaaaaaaaaaaaaaaaaaaaaaaaaaaaaaaaaaaaaaaaaaaaaaaaaaaaaaaaaaaaaaaaugcaucccccccccccccccccccccccccccccccaaaggcucuuuucagagccaccagaauu

SEQ ID NO: 20896 - RNA, 1100 nt, Artificial Sequence
  mRNA product Design h-3 comprising derived and/or modified sequence from HRSV(Memphis-37)__AIY60637.1__P (opt1)
gggagacccgugacccggaaguuguacggcuacgcgacuuucccucccacaaacccucgcgcccuuccuuuccuacuugggcccggcagaaagcuuaccauggagaaguucgcccccgaguuccacggcgaggacgccaacaaccgcgcgaccaaguuccuggagagcaucaaggggaaguucaccuccccgaaggaccccaagaagaaggacagcaucaucuccgugaacagcaucgacaucgaggucacgaaggagucccccaucaccagcaacuccaccaucaucaaccccaccaacgagacggacgacaccgccggcaacaagccgaacuaccagcggaagccccucgugagcuucaaggaggaccccacccccuccgacaacccguucagcaagcuguacaaggagaccaucgagacguucgacaacaacgaggaggaguccagcuacuccuacgaggagaucaacgaccagaccaacgacaacaucaccgcccgccuggaccggaucgacgagaagcucagcgagauccuggggaugcugcacacccucguggucgccuccgccggccccacgagcgcgcgcgacgggauccgggacgccauggugggccugcgcgaggagaugaucgagaagauccggaccgaggcccugaugaccaacgaccgccucgaggccauggcgcggcugcgcaacgaggaguccgagaagauggccaaggacaccagcgacgaggugucccugaaccccacgagcgagaagcucaacaaccugcuggagggcaacgacagcgacaacgaccucucccuggaggacuucugaggacuaguggaagcauuuuccuggcugauuaaaagaaauuacucagcuauggucaucuguuccuguuagaaggcuaugcagcauauuauauacuaugcgcauguuaugaaaugcauaauaaaaaauuuuaaaaaaucuaaaagaucuaaaaaaaaaaaaaaaaaaaaaaaaaaaaaaaaaaaaaaaaaaaaaaaaaaaaaaaaaaaaaaaaugcaucccccccccccccccccccccccccccccccaaaggcucuuuucagagccaccagaauu

SEQ ID NO: 20897 - RNA, 1100 nt, Artificial Sequence
  mRNA product Design h-3 comprising derived and/or modified sequence from HRSV(Memphis-37)__AIY60637.1__P (opt2)
gggagacccgugacccggaaguuguacggcuacgcgacuuucccucccacaaacccucgcgcccuuccuuuccuacuugggcccggcagaaagcuuaccauggagaaguucgcccccgaguuccacggcgaggacgccaacaaccgcgccaccaaguuccucgaguccaucaagggcaaguucaccucccccaaggaccccaagaagaaggacuccaucaucuccgucaacuccaucgacaucgaggucaccaaggagucccccaucaccuccaacuccaccaucaucaaccccaccaacgagaccgacgacaccgccggcaacaagcccaacuaccagcgcaagccccucgucuccuucaaggaggaccccacccccuccgacaaccccuucuccaagcucuacaaggagaccaucgagaccuucgacaacaacgaggaggaguccuccuacuccuacgaggagaucaacgaccagaccaacgacaacaucaccgcccgccucgaccgcaucgacgagaagcucuccgagauccucggcaugcuccacacccucgucgucgccuccgccggccccaccuccgcccgcgacggcauccgcgacgccauggucggccuccgcgaggagaugaucgagaagauccgcaccgaggcccucaugaccaacgaccgccucgaggccauggcccgccuccgcaacgaggaguccgagaagauggccaaggacaccuccgacgaggucucccucaaccccaccuccgagaagcucaacaaccuccucgagggcaacgacuccgacaacgaccucucccucgaggacuucugaggacuaguggaagcauuuuccuggcugauuaaaagaaauuacucagcuauggucaucuguuccuguuagaaggcuaugcagcauauuauauacuaugcgcauguuaugaaaugcauaauaaaaaauuuuaaaaaaucuaaaagaucuaaaaaaaaaaaaaaaaaaaaaaaaaaaaaaaaaaaaaaaaaaaaaaaaaaaaaaaaaaaaaaaaugcaucccccccccccccccccccccccccccccccaaaggcucuuuucagagccaccagaauu

SEQ ID NO: 20898 - RNA, 1100 nt, Artificial Sequence
  mRNA product Design h-3 comprising derived and/or modified sequence from HRSV(Memphis-37)__AIY60637.1__P (opt3)
gggagacccgugacccggaaguuguacggcuacgcgacuuucccucccacaaacccucgcgcccuuccuuuccuacuugggcccggcagaaagcuuaccauggagaaguucgcccccgaauuucacggcgaggacgcuaacaauagagcaaccaaauuccuggaaagcaucaaggggaaauuuacauccccuaaggauccgaaaaagaaggacucuauuauaucagugaacaguaucgauauugaggucacuaaagaaagcccaaucacguccaauucuaccauuaucaaccccacaaaugagacugacgauaccgccggaaacaagccuaauuaccagaggaaaccacucguuucguucaaggaggaccccacaccuucagauaacccauuuagcaaacuuuauaaggaaaccauagagacuuucgacaauaacgaagaggagaguuccuacucuuaugaagagaucaaugaucaaacaaacgacaauauuaccgcgcggcuggaucgcaucgacgaaaaguugagcgagauuuuagguaugcugcauacgcuagugguagcuuccgccggccccacuucagcacgagaugggauccgugacgccauggugggacucagagaagagaugauagagaaaauuaggaccgaagcucugaugacaaacgaccggcuugaggcaauggcccgccugagaaaugaagagagugaaaagauggcuaaagauacuagcgacgaggucucuuugaacccuaccuccgagaagcucaacaaucugcuggaaggcaacgauucagacaaugaucucagcuuagaggacuuuugaggacuaguggaagcauuuuccuggcugauuaaaagaaauuacucagcuauggucaucuguuccuguuagaaggcuaugcagcauauuauauacuaugcgcauguuaugaaaugcauaauaaaaaauuuuaaaaaaucuaaaagaucuaaaaaaaaaaaaaaaaaaaaaaaaaaaaaaaaaaaaaaaaaaaaaaaaaaaaaaaaaaaaaaaaugcaucccccccccccccccccccccccccccccccaaaggcucuuuucagagccaccagaauu

SEQ ID NO: 20899 - RNA, 1100 nt, Artificial Sequence
  mRNA product Design h-3 comprising derived and/or modified sequence from HRSV(Memphis-37)__AIY60637.1__P (opt4)
gggagacccgugacccggaaguuguacggcuacgcgacuuucccucccacaaacccucgcgcccuuccuuuccuacuugggcccggcagaaagcuuaccauggagaaguucgcccccgaguuccacggcgaggacgccaacaacagagccaccaaguuccuggagagcaucaagggcaaguucaccagccccaaggaccccaagaagaaggacagcaucaucagcgugaacagcaucgacaucgaggugaccaaggagagccccaucaccagcaacagcaccaucaucaaccccaccaacgagaccgacgacaccgccggcaacaagcccaacuaccagagaaagccccuggugagcuucaaggaggaccccacccccagcgacaaccccuucagcaagcuguacaaggagaccaucgagaccuucgacaacaacgaggaggagagcagcuacagcuacgaggagaucaacgaccagaccaacgacaacaucaccgccagacuggacagaaucgacgagaagcugagcgagauccugggcaugcugcacacccuggugguggccagcgccggccccaccagcgccagagacggcaucagagacgccauggugggccugagagaggagaugaucgagaagaucagaaccgaggcccugaugaccaacgacagacuggaggccauggccagacugagaaacgaggagagcgagaagauggccaaggacaccagcgacgaggugagccugaaccccaccagcgagaagcugaacaaccugcuggagggcaacgacagcgacaacgaccugagccuggaggacuucugaggacuaguggaagcauuuuccuggcugauuaaaagaaauuacucagcuauggucaucuguuccuguuagaaggcuaugcagcauauuauauacuaugcgcauguuaugaaaugcauaauaaaaaauuuuaaaaaaucuaaaagaucuaaaaaaaaaaaaaaaaaaaaaaaaaaaaaaaaaaaaaaaaaaaaaaaaaaaaaaaaaaaaaaaaugcaucccccccccccccccccccccccccccccccaaaggcucuuuucagagccaccagaauu

SEQ ID NO: 20900 - RNA, 1100 nt, Artificial Sequence
  mRNA product Design h-3 comprising derived and/or modified sequence from HRSV(Memphis-37)__AIY60637.1__P (opt5)
gggagacccgugacccggaaguuguacggcuacgcgacuuucccucccacaaacccucgcgcccuuccuuuccuacuugggcccggcagaaagcuuaccauggagaaguucgcccccgaauuucacggcgaggacgcuaacaauagagccaccaaauuccuggaaagcaucaaggggaaauuuacauccccuaaggauccgaaaaagaaggacucuauuaucagcgugaacuccauugauaucgaggucacgaaagaaucucccauuaccagcaauuccacaaucaucaacccuaccaaugagacagacgauaccgcgggaaacaagcccaauuaccagcggaaaccucucguuucuuucaaggaggaccccacaccuagcgauaacccguuuuccaaacuguauaaggaaaccauugagacguucgacaauaacgaagaggagagcucuuacuccuaugaagagaucaaugaucaaaccaacgacaauauuacagcucgccuugauagaaucgacgaaaagcugagcgagauucucggcaugcugcauacccuugugguggccucugccgggcccacauccgcucgggauggaauccgcgacgccauggucggccugagagaagagaugauugagaaaauccggaccgaagcucucaugacgaacgaccgccuggaggccauggcgagacugcggaaugaagagagcgaaaagauggccaaagauacaucugacgaggugucccucaacccuaccagcgagaagcugaacaaucuucuggaagggaacgauuccgacaaugaucucucucuggaggacuuuugaggacuaguggaagcauuuuccuggcugauuaaaagaaauuacucagcuauggucaucuguuccuguuagaaggcuaugcagcauauuauauacuaugcgcauguuaugaaaugcauaauaaaaaauuuuaaaaaaucuaaaagaucuaaaaaaaaaaaaaaaaaaaaaaaaaaaaaaaaaaaaaaaaaaaaaaaaaaaaaaaaaaaaaaaaugcaucccccccccccccccccccccccccccccccaaaggcucuuuucagagccaccagaauu

SEQ ID NO: 20901 - RNA, 1100 nt, Artificial Sequence
  mRNA product Design h-3 comprising derived and/or modified sequence from HRSV(Memphis-37)__AIY60637.1__P (opt6)
gggagacccgugacccggaaguuguacggcuacgcgacuuucccucccacaaacccucgcgcccuuccuuuccuacuugggcccggcagaaagcuuaccauggaaaaauucgcaccagaauuccacggagaagacgcaaacaacagagcaacaaaauuccuagaaucaauaaaaggaaaauucacaagcccaaaagaucccaaaaaaaaagacucaaucauaagcguaaacucaauagauauagaaguaacaaaagaaaguccaauaacaagcaacaguacaauaauaaacccaacaaaugaaacagacgauacagcaggcaacaaaccaaacuaccaaagaaaaccgcuaguaaguuucaaagaagacccaacaccaagcgauaacccauuuucaaaauuauacaaagaaacaauagaaacauucgacaacaacgaagaagaaagcucauacucauacgaagaaauaaacgaccaaacaaacgacaacauaacagcgagauuagacagaauagacgaaaaacuaucagaaauacuaggcauguuacacacauuaguaguagcaagcgcaggaccaacaucagcaagagacggaauccgagacgcaaugguaggacuaagagaagaaaugauagaaaaaauaagaacagaagcacuaaugacaaacgacagacuagaagccauggcaagacuaagaaacgaagaaucagaaaaaauggcaaaagacacaucagacgaaguaucacuaaacccaacaagcgaaaaacuaaacaaccuauuagaaggaaacgacagcgacaacgaccuaucacucgaagacuucuaaggacuaguggaagcauuuuccuggcugauuaaaagaaauuacucagcuauggucaucuguuccuguuagaaggcuaugcagcauauuauauacuaugcgcauguuaugaaaugcauaauaaaaaauuuuaaaaaaucuaaaagaucuaaaaaaaaaaaaaaaaaaaaaaaaaaaaaaaaaaaaaaaaaaaaaaaaaaaaaaaaaaaaaaaaugcaucccccccccccccccccccccccccccccccaaaggcucuuuucagagccaccagaauu

SEQ ID NO: 20902 - RNA, 1100 nt, Artificial Sequence
  mRNA product Design h-3 comprising derived and/or modified sequence from HRSV(Memphis-37)__AIY60637.1__P (opt11)
gggagacccgugacccggaaguuguacggcuacgcgacuuucccucccacaaacccucgcgcccuuccuuuccuacuugggcccggcagaaagcuuaccauggaaaaauucgccccagaauuucacggcgaagacgccaacaaccgagccaccaaauuccucgaaucaauaaaaggcaaauucacaucccccaaagaccccaaaaaaaaagacucgaucaucuccgugaacucaaucgacauagaagucaccaaagaaagccccaucaccuccaacagcaccaucaucaaccccacaaacgaaacagacgacaccgccggcaacaaaccaaacuaccaacgaaaaccccucgucagcuucaaagaagaccccacaccaagcgacaaccccuucuccaaacucuacaaagaaacaauagaaaccuucgacaacaacgaagaagaaagcucguacucauacgaagaaaucaacgaccaaaccaacgacaacaucaccgcccgccucgaccgcaucgacgaaaaacucuccgaaauccucggaaugcuccacacacucgucgucgccagcgccggccccaccucagcccgggacggcauccgcgacgccauggugggccuccgcgaggaaaugaucgaaaaaauccgcacagaagcccucaugaccaacgaccgccucgaagccauggcccgccuccgcaacgaagaauccgaaaaaauggccaaagacaccuccgacgaagucucacuaaaccccaccuccgaaaaacuaaacaaccuccuagaaggcaacgacagcgacaacgaccucucccuagaagacuucuaaggacuaguggaagcauuuuccuggcugauuaaaagaaauuacucagcuauggucaucuguuccuguuagaaggcuaugcagcauauuauauacuaugcgcauguuaugaaaugcauaauaaaaaauuuuaaaaaaucuaaaagaucuaaaaaaaaaaaaaaaaaaaaaaaaaaaaaaaaaaaaaaaaaaaaaaaaaaaaaaaaaaaaaaaaugcaucccccccccccccccccccccccccccccccaaaggcucuuuucagagccaccagaauu

SEQ ID NO: 20903 - RNA, 1163 nt, Artificial Sequence
  mRNA product Design h-4 comprising derived and/or modified sequence from HRSV(Memphis-37)__AIY60637.1__P (wt)
gggagagggcgcuuggcuugcaaggacccugagcugcggcauugaagcacacccaacccaacucgacugaagucagccucacugaaccggaucugagaaucuucucucucugggcuugccagggcucuccgaaccuagcuagcauccucuucaauuccaacuagaaagcuuaccauggaaaaguuugcuccugaauuccauggagaagacgcaaacaacagagccacuaaauuccuagaaucaauaaagggcaaauucacaucaccuaaagaucccaagaaaaaagauaguaucauaucugucaacucaauagauauagaaguaaccaaagaaagcccuauaacuucaaauucaaccauuauaaacccuacaaaugagacagaugauacugcagggaacaagcccaauuaucaaagaaaaccacuagugaguuucaaagaagacccuacgccaagugauaaucccuuuucaaaacuauacaaagaaaccauagaaacauuugauaacaaugaagaagaaucuagcuauucauaugaagaaauaaaugaucagacaaacgauaauauaacagcaagauuagauaggauugaugaaaaauuaagugaaauacuaggaaugcuucacacacuaguaguagcaagugcaggaccuacaucugcucgggaugguauaagagaugccaugguugguuuaagagaagaaaugauagaaaaaaucagaacugaagcauugaugaccaaugauagauuagaagcuauggcaagacucaggaaugaggaaagugaaaagauggcaaaagacacaucagaugaagugucucucaauccaacaucagagaaauugaacaaccuguuggaaggaaaugauagugauaaugaucuaucacuugaagauuucugaggacuaguaauaaggaaacuguaugaaugucugugggcaggaagugaagagauccuucuguaaagguuuuuggaauuaugucugcugaauaauaaacuuuuuugaaauaauaaaucugguagaaaaaugagaucuaaaaaaaaaaaaaaaaaaaaaaaaaaaaaaaaaaaaaaaaaaaaaaaaaaaaaaaaaaaaaaaaugcaucccccccccccccccccccccccccccccccaaaggcucuuuucagagccaccagaauu

SEQ ID NO: 20904 - RNA, 1163 nt, Artificial Sequence
  mRNA product Design h-4 comprising derived and/or modified sequence from HRSV(Memphis-37)__AIY60637.1__P (opt1)
gggagagggcgcuuggcuugcaaggacccugagcugcggcauugaagcacacccaacccaacucgacugaagucagccucacugaaccggaucugagaaucuucucucucugggcuugccagggcucuccgaaccuagcuagcauccucuucaauuccaacuagaaagcuuaccauggagaaguucgcccccgaguuccacggcgaggacgccaacaaccgcgcgaccaaguuccuggagagcaucaaggggaaguucaccuccccgaaggaccccaagaagaaggacagcaucaucuccgugaacagcaucgacaucgaggucacgaaggagucccccaucaccagcaacuccaccaucaucaaccccaccaacgagacggacgacaccgccggcaacaagccgaacuaccagcggaagccccucgugagcuucaaggaggaccccacccccuccgacaacccguucagcaagcuguacaaggagaccaucgagacguucgacaacaacgaggaggaguccagcuacuccuacgaggagaucaacgaccagaccaacgacaacaucaccgcccgccuggaccggaucgacgagaagcucagcgagauccuggggaugcugcacacccucguggucgccuccgccggccccacgagcgcgcgcgacgggauccgggacgccauggugggccugcgcgaggagaugaucgagaagauccggaccgaggcccugaugaccaacgaccgccucgaggccauggcgcggcugcgcaacgaggaguccgagaagauggccaaggacaccagcgacgaggugucccugaaccccacgagcgagaagcucaacaaccugcuggagggcaacgacagcgacaacgaccucucccuggaggacuucugaggacuaguaauaaggaaacuguaugaaugucugugggcaggaagugaagagauccuucuguaaagguuuuuggaauuaugucugcugaauaauaaacuuuuuugaaauaauaaaucugguagaaaaaugagaucuaaaaaaaaaaaaaaaaaaaaaaaaaaaaaaaaaaaaaaaaaaaaaaaaaaaaaaaaaaaaaaaaugcaucccccccccccccccccccccccccccccccaaaggcucuuuucagagccaccagaauu

SEQ ID NO: 20905 - RNA, 1163 nt, Artificial Sequence
  mRNA product Design h-4 comprising derived and/or modified sequence from HRSV(Memphis-37)__AIY60637.1__P (opt2)
gggagagggcgcuuggcuugcaaggacccugagcugcggcauugaagcacacccaacccaacucgacugaagucagccucacugaaccggaucugagaaucuucucucucugggcuugccagggcucuccgaaccuagcuagcauccucuucaauuccaacuagaaagcuuaccauggagaaguucgcccccgaguuccacggcgaggacgccaacaaccgcgccaccaaguuccucgaguccaucaagggcaaguucaccucccccaaggaccccaagaagaaggacuccaucaucuccgucaacuccaucgacaucgaggucaccaaggagucccccaucaccuccaacuccaccaucaucaaccccaccaacgagaccgacgacaccgccggcaacaagcccaacuaccagcgcaagccccucgucuccuucaaggaggaccccacccccuccgacaaccccuucuccaagcucuacaaggagaccaucgagaccuucgacaacaacgaggaggaguccuccuacuccuacgaggagaucaacgaccagaccaacgacaacaucaccgcccgccucgaccgcaucgacgagaagcucuccgagauccucggcaugcuccacacccucgucgucgccuccgccggccccaccuccgcccgcgacggcauccgcgacgccauggucggccuccgcgaggagaugaucgagaagauccgcaccgaggcccucaugaccaacgaccgccucgaggccauggcccgccuccgcaacgaggaguccgagaagauggccaaggacaccuccgacgaggucucccucaaccccaccuccgagaagcucaacaaccuccucgagggcaacgacuccgacaacgaccucucccucgaggacuucugaggacuaguaauaaggaaacuguaugaaugucugugggcaggaagugaagagauccuucuguaaagguuuuuggaauuaugucugcugaauaauaaacuuuuuugaaauaauaaaucugguagaaaaaugagaucuaaaaaaaaaaaaaaaaaaaaaaaaaaaaaaaaaaaaaaaaaaaaaaaaaaaaaaaaaaaaaaaaugcaucccccccccccccccccccccccccccccccaaaggcucuuuucagagccaccagaauu

SEQ ID NO: 20906 - RNA, 1163 nt, Artificial Sequence
  mRNA product Design h-4 comprising derived and/or modified sequence from HRSV(Memphis-37)__AIY60637.1__P (opt3)
gggagagggcgcuuggcuugcaaggacccugagcugcggcauugaagcacacccaacccaacucgacugaagucagccucacugaaccggaucugagaaucuucucucucugggcuugccagggcucuccgaaccuagcuagcauccucuucaauuccaacuagaaagcuuaccauggagaaguucgcccccgaauuucacggcgaggacgcuaacaauagagcaaccaaauuccuggaaagcaucaaggggaaauuuacauccccuaaggauccgaaaaagaaggacucuauuauaucagugaacaguaucgauauugaggucacuaaagaaagcccaaucacguccaauucuaccauuaucaaccccacaaaugagacugacgauaccgccggaaacaagccuaauuaccagaggaaaccacucguuucguucaaggaggaccccacaccuucagauaacccauuuagcaaacuuuauaaggaaaccauagagacuuucgacaauaacgaagaggagaguuccuacucuuaugaagagaucaaugaucaaacaaacgacaauauuaccgcgcggcuggaucgcaucgacgaaaaguugagcgagauuuuagguaugcugcauacgcuagugguagcuuccgccggccccacuucagcacgagaugggauccgugacgccauggugggacucagagaagagaugauagagaaaauuaggaccgaagcucugaugacaaacgaccggcuugaggcaauggcccgccugagaaaugaagagagugaaaagauggcuaaagauacuagcgacgaggucucuuugaacccuaccuccgagaagcucaacaaucugcuggaaggcaacgauucagacaaugaucucagcuuagaggacuuuugaggacuaguaauaaggaaacuguaugaaugucugugggcaggaagugaagagauccuucuguaaagguuuuuggaauuaugucugcugaauaauaaacuuuuuugaaauaauaaaucugguagaaaaaugagaucuaaaaaaaaaaaaaaaaaaaaaaaaaaaaaaaaaaaaaaaaaaaaaaaaaaaaaaaaaaaaaaaaugcaucccccccccccccccccccccccccccccccaaaggcucuuuucagagccaccagaauu

SEQ ID NO: 20907 - RNA, 1163 nt, Artificial Sequence
  mRNA product Design h-4 comprising derived and/or modified sequence from HRSV(Memphis-37)__AIY60637.1__P (opt4)
gggagagggcgcuuggcuugcaaggacccugagcugcggcauugaagcacacccaacccaacucgacugaagucagccucacugaaccggaucugagaaucuucucucucugggcuugccagggcucuccgaaccuagcuagcauccucuucaauuccaacuagaaagcuuaccauggagaaguucgcccccgaguuccacggcgaggacgccaacaacagagccaccaaguuccuggagagcaucaagggcaaguucaccagccccaaggaccccaagaagaaggacagcaucaucagcgugaacagcaucgacaucgaggugaccaaggagagccccaucaccagcaacagcaccaucaucaaccccaccaacgagaccgacgacaccgccggcaacaagcccaacuaccagagaaagccccuggugagcuucaaggaggaccccacccccagcgacaaccccuucagcaagcuguacaaggagaccaucgagaccuucgacaacaacgaggaggagagcagcuacagcuacgaggagaucaacgaccagaccaacgacaacaucaccgccagacuggacagaaucgacgagaagcugagcgagauccugggcaugcugcacacccuggugguggccagcgccggccccaccagcgccagagacggcaucagagacgccauggugggccugagagaggagaugaucgagaagaucagaaccgaggcccugaugaccaacgacagacuggaggccauggccagacugagaaacgaggagagcgagaagauggccaaggacaccagcgacgaggugagccugaaccccaccagcgagaagcugaacaaccugcuggagggcaacgacagcgacaacgaccugagccuggaggacuucugaggacuaguaauaaggaaacuguaugaaugucugugggcaggaagugaagagauccuucuguaaagguuuuuggaauuaugucugcugaauaauaaacuuuuuugaaauaauaaaucugguagaaaaaugagaucuaaaaaaaaaaaaaaaaaaaaaaaaaaaaaaaaaaaaaaaaaaaaaaaaaaaaaaaaaaaaaaaaugcaucccccccccccccccccccccccccccccccaaaggcucuuuucagagccaccagaauu

SEQ ID NO: 20908 - RNA, 1163 nt, Artificial Sequence
  mRNA product Design h-4 comprising derived and/or modified sequence from HRSV(Memphis-37)__AIY60637.1__P (opt5)
gggagagggcgcuuggcuugcaaggacccugagcugcggcauugaagcacacccaacccaacucgacugaagucagccucacugaaccggaucugagaaucuucucucucugggcuugccagggcucuccgaaccuagcuagcauccucuucaauuccaacuagaaagcuuaccauggagaaguucgcccccgaauuucacggcgaggacgcuaacaauagagccaccaaauuccuggaaagcaucaaggggaaauuuacauccccuaaggauccgaaaaagaaggacucuauuaucagcgugaacuccauugauaucgaggucacgaaagaaucucccauuaccagcaauuccacaaucaucaacccuaccaaugagacagacgauaccgcgggaaacaagcccaauuaccagcggaaaccucucguuucuuucaaggaggaccccacaccuagcgauaacccguuuuccaaacuguauaaggaaaccauugagacguucgacaauaacgaagaggagagcucuuacuccuaugaagagaucaaugaucaaaccaacgacaauauuacagcucgccuugauagaaucgacgaaaagcugagcgagauucucggcaugcugcauacccuugugguggccucugccgggcccacauccgcucgggauggaauccgcgacgccauggucggccugagagaagagaugauugagaaaauccggaccgaagcucucaugacgaacgaccgccuggaggccauggcgagacugcggaaugaagagagcgaaaagauggccaaagauacaucugacgaggugucccucaacccuaccagcgagaagcugaacaaucuucuggaagggaacgauuccgacaaugaucucucucuggaggacuuuugaggacuaguaauaaggaaacuguaugaaugucugugggcaggaagugaagagauccuucuguaaagguuuuuggaauuaugucugcugaauaauaaacuuuuuugaaauaauaaaucugguagaaaaaugagaucuaaaaaaaaaaaaaaaaaaaaaaaaaaaaaaaaaaaaaaaaaaaaaaaaaaaaaaaaaaaaaaaaugcaucccccccccccccccccccccccccccccccaaaggcucuuuucagagccaccagaauu

SEQ ID NO: 20909 - RNA, 1163 nt, Artificial Sequence
  mRNA product Design h-4 comprising derived and/or modified sequence from HRSV(Memphis-37)__AIY60637.1__P (opt6)
gggagagggcgcuuggcuugcaaggacccugagcugcggcauugaagcacacccaacccaacucgacugaagucagccucacugaaccggaucugagaaucuucucucucugggcuugccagggcucuccgaaccuagcuagcauccucuucaauuccaacuagaaagcuuaccauggaaaaauucgcaccagaauuccacggagaagacgcaaacaacagagcaacaaaauuccuagaaucaauaaaaggaaaauucacaagcccaaaagaucccaaaaaaaaagacucaaucauaagcguaaacucaauagauauagaaguaacaaaagaaaguccaauaacaagcaacaguacaauaauaaacccaacaaaugaaacagacgauacagcaggcaacaaaccaaacuaccaaagaaaaccgcuaguaaguuucaaagaagacccaacaccaagcgauaacccauuuucaaaauuauacaaagaaacaauagaaacauucgacaacaacgaagaagaaagcucauacucauacgaagaaauaaacgaccaaacaaacgacaacauaacagcgagauuagacagaauagacgaaaaacuaucagaaauacuaggcauguuacacacauuaguaguagcaagcgcaggaccaacaucagcaagagacggaauccgagacgcaaugguaggacuaagagaagaaaugauagaaaaaauaagaacagaagcacuaaugacaaacgacagacuagaagccauggcaagacuaagaaacgaagaaucagaaaaaauggcaaaagacacaucagacgaaguaucacuaaacccaacaagcgaaaaacuaaacaaccuauuagaaggaaacgacagcgacaacgaccuaucacucgaagacuucuaaggacuaguaauaaggaaacuguaugaaugucugugggcaggaagugaagagauccuucuguaaagguuuuuggaauuaugucugcugaauaauaaacuuuuuugaaauaauaaaucugguagaaaaaugagaucuaaaaaaaaaaaaaaaaaaaaaaaaaaaaaaaaaaaaaaaaaaaaaaaaaaaaaaaaaaaaaaaaugcaucccccccccccccccccccccccccccccccaaaggcucuuuucagagccaccagaauu

SEQ ID NO: 20910 - RNA, 1163 nt, Artificial Sequence
  mRNA product Design h-4 comprising derived and/or modified sequence from HRSV(Memphis-37)__AIY60637.1__P (opt11)
gggagagggcgcuuggcuugcaaggacccugagcugcggcauugaagcacacccaacccaacucgacugaagucagccucacugaaccggaucugagaaucuucucucucugggcuugccagggcucuccgaaccuagcuagcauccucuucaauuccaacuagaaagcuuaccauggaaaaauucgccccagaauuucacggcgaagacgccaacaaccgagccaccaaauuccucgaaucaauaaaaggcaaauucacaucccccaaagaccccaaaaaaaaagacucgaucaucuccgugaacucaaucgacauagaagucaccaaagaaagccccaucaccuccaacagcaccaucaucaaccccacaaacgaaacagacgacaccgccggcaacaaaccaaacuaccaacgaaaaccccucgucagcuucaaagaagaccccacaccaagcgacaaccccuucuccaaacucuacaaagaaacaauagaaaccuucgacaacaacgaagaagaaagcucguacucauacgaagaaaucaacgaccaaaccaacgacaacaucaccgcccgccucgaccgcaucgacgaaaaacucuccgaaauccucggaaugcuccacacacucgucgucgccagcgccggccccaccucagcccgggacggcauccgcgacgccauggugggccuccgcgaggaaaugaucgaaaaaauccgcacagaagcccucaugaccaacgaccgccucgaagccauggcccgccuccgcaacgaagaauccgaaaaaauggccaaagacaccuccgacgaagucucacuaaaccccaccuccgaaaaacuaaacaaccuccuagaaggcaacgacagcgacaacgaccucucccuagaagacuucuaaggacuaguaauaaggaaacuguaugaaugucugugggcaggaagugaagagauccuucuguaaagguuuuuggaauuaugucugcugaauaauaaacuuuuuugaaauaauaaaucugguagaaaaaugagaucuaaaaaaaaaaaaaaaaaaaaaaaaaaaaaaaaaaaaaaaaaaaaaaaaaaaaaaaaaaaaaaaaugcaucccccccccccccccccccccccccccccccaaaggcucuuuucagagccaccagaauu

SEQ ID NO: 20911 - RNA, 1179 nt, Artificial Sequence
  mRNA product Design h-5 comprising derived and/or modified sequence from HRSV(Memphis-37)__AIY60637.1__P (wt)
gggagagggcgcuuggcuugcaaggacccugagcugcggcauugaagcacacccaacccaacucgacugaagucagccucacugaaccggaucugagaaucuucucucucugggcuugccagggcucuccgaaccuagcuagcauccucuucaauuccaacuagaaagcuuaccauggaaaaguuugcuccugaauuccauggagaagacgcaaacaacagagccacuaaauuccuagaaucaauaaagggcaaauucacaucaccuaaagaucccaagaaaaaagauaguaucauaucugucaacucaauagauauagaaguaaccaaagaaagcccuauaacuucaaauucaaccauuauaaacccuacaaaugagacagaugauacugcagggaacaagcccaauuaucaaagaaaaccacuagugaguuucaaagaagacccuacgccaagugauaaucccuuuucaaaacuauacaaagaaaccauagaaacauuugauaacaaugaagaagaaucuagcuauucauaugaagaaauaaaugaucagacaaacgauaauauaacagcaagauuagauaggauugaugaaaaauuaagugaaauacuaggaaugcuucacacacuaguaguagcaagugcaggaccuacaucugcucgggaugguauaagagaugccaugguugguuuaagagaagaaaugauagaaaaaaucagaacugaagcauugaugaccaaugauagauuagaagcuauggcaagacucaggaaugaggaaagugaaaagauggcaaaagacacaucagaugaagugucucucaauccaacaucagagaaauugaacaaccuguuggaaggaaaugauagugauaaugaucuaucacuugaagauuucugaggacuaguacuggcugcaucucccuuuccucuguccuccauccuucucccaggauggugaagggggaccugguacccagugauccccaccccaggauccuaaaucaugacuuaccugcuaauaaaaacucauuggaaaagugagaagaucuaaaaaaaaaaaaaaaaaaaaaaaaaaaaaaaaaaaaaaaaaaaaaaaaaaaaaaaaaaaaaaaaugcaucccccccccccccccccccccccccccccccaaaggcucuuuucagagccaccagaauu

SEQ ID NO: 20912 - RNA, 1179 nt, Artificial Sequence
  mRNA product Design h-5 comprising derived and/or modified sequence from HRSV(Memphis-37)__AIY60637.1__P (opt1)
gggagagggcgcuuggcuugcaaggacccugagcugcggcauugaagcacacccaacccaacucgacugaagucagccucacugaaccggaucugagaaucuucucucucugggcuugccagggcucuccgaaccuagcuagcauccucuucaauuccaacuagaaagcuuaccauggagaaguucgcccccgaguuccacggcgaggacgccaacaaccgcgcgaccaaguuccuggagagcaucaaggggaaguucaccuccccgaaggaccccaagaagaaggacagcaucaucuccgugaacagcaucgacaucgaggucacgaaggagucccccaucaccagcaacuccaccaucaucaaccccaccaacgagacggacgacaccgccggcaacaagccgaacuaccagcggaagccccucgugagcuucaaggaggaccccacccccuccgacaacccguucagcaagcuguacaaggagaccaucgagacguucgacaacaacgaggaggaguccagcuacuccuacgaggagaucaacgaccagaccaacgacaacaucaccgcccgccuggaccggaucgacgagaagcucagcgagauccuggggaugcugcacacccucguggucgccuccgccggccccacgagcgcgcgcgacgggauccgggacgccauggugggccugcgcgaggagaugaucgagaagauccggaccgaggcccugaugaccaacgaccgccucgaggccauggcgcggcugcgcaacgaggaguccgagaagauggccaaggacaccagcgacgaggugucccugaaccccacgagcgagaagcucaacaaccugcuggagggcaacgacagcgacaacgaccucucccuggaggacuucugaggacuaguacuggcugcaucucccuuuccucuguccuccauccuucucccaggauggugaagggggaccugguacccagugauccccaccccaggauccuaaaucaugacuuaccugcuaauaaaaacucauuggaaaagugagaagaucuaaaaaaaaaaaaaaaaaaaaaaaaaaaaaaaaaaaaaaaaaaaaaaaaaaaaaaaaaaaaaaaaugcaucccccccccccccccccccccccccccccccaaaggcucuuuucagagccaccagaauu

SEQ ID NO: 20913 - RNA, 1179 nt, Artificial Sequence
  mRNA product Design h-5 comprising derived and/or modified sequence from HRSV(Memphis-37)__AIY60637.1__P (opt2)
gggagagggcgcuuggcuugcaaggacccugagcugcggcauugaagcacacccaacccaacucgacugaagucagccucacugaaccggaucugagaaucuucucucucugggcuugccagggcucuccgaaccuagcuagcauccucuucaauuccaacuagaaagcuuaccauggagaaguucgcccccgaguuccacggcgaggacgccaacaaccgcgccaccaaguuccucgaguccaucaagggcaaguucaccucccccaaggaccccaagaagaaggacuccaucaucuccgucaacuccaucgacaucgaggucaccaaggagucccccaucaccuccaacuccaccaucaucaaccccaccaacgagaccgacgacaccgccggcaacaagcccaacuaccagcgcaagccccucgucuccuucaaggaggaccccacccccuccgacaaccccuucuccaagcucuacaaggagaccaucgagaccuucgacaacaacgaggaggaguccuccuacuccuacgaggagaucaacgaccagaccaacgacaacaucaccgcccgccucgaccgcaucgacgagaagcucuccgagauccucggcaugcuccacacccucgucgucgccuccgccggccccaccuccgcccgcgacggcauccgcgacgccauggucggccuccgcgaggagaugaucgagaagauccgcaccgaggcccucaugaccaacgaccgccucgaggccauggcccgccuccgcaacgaggaguccgagaagauggccaaggacaccuccgacgaggucucccucaaccccaccuccgagaagcucaacaaccuccucgagggcaacgacuccgacaacgaccucucccucgaggacuucugaggacuaguacuggcugcaucucccuuuccucuguccuccauccuucucccaggauggugaagggggaccugguacccagugauccccaccccaggauccuaaaucaugacuuaccugcuaauaaaaacucauuggaaaagugagaagaucuaaaaaaaaaaaaaaaaaaaaaaaaaaaaaaaaaaaaaaaaaaaaaaaaaaaaaaaaaaaaaaaaugcaucccccccccccccccccccccccccccccccaaaggcucuuuucagagccaccagaauu

SEQ ID NO: 20914 - RNA, 1179 nt, Artificial Sequence
  mRNA product Design h-5 comprising derived and/or modified sequence from HRSV(Memphis-37)__AIY60637.1__P (opt3)
gggagagggcgcuuggcuugcaaggacccugagcugcggcauugaagcacacccaacccaacucgacugaagucagccucacugaaccggaucugagaaucuucucucucugggcuugccagggcucuccgaaccuagcuagcauccucuucaauuccaacuagaaagcuuaccauggagaaguucgcccccgaauuucacggcgaggacgcuaacaauagagcaaccaaauuccuggaaagcaucaaggggaaauuuacauccccuaaggauccgaaaaagaaggacucuauuauaucagugaacaguaucgauauugaggucacuaaagaaagcccaaucacguccaauucuaccauuaucaaccccacaaaugagacugacgauaccgccggaaacaagccuaauuaccagaggaaaccacucguuucguucaaggaggaccccacaccuucagauaacccauuuagcaaacuuuauaaggaaaccauagagacuuucgacaauaacgaagaggagaguuccuacucuuaugaagagaucaaugaucaaacaaacgacaauauuaccgcgcggcuggaucgcaucgacgaaaaguugagcgagauuuuagguaugcugcauacgcuagugguagcuuccgccggccccacuucagcacgagaugggauccgugacgccauggugggacucagagaagagaugauagagaaaauuaggaccgaagcucugaugacaaacgaccggcuugaggcaauggcccgccugagaaaugaagagagugaaaagauggcuaaagauacuagcgacgaggucucuuugaacccuaccuccgagaagcucaacaaucugcuggaaggcaacgauucagacaaugaucucagcuuagaggacuuuugaggacuaguacuggcugcaucucccuuuccucuguccuccauccuucucccaggauggugaagggggaccugguacccagugauccccaccccaggauccuaaaucaugacuuaccugcuaauaaaaacucauuggaaaagugagaagaucuaaaaaaaaaaaaaaaaaaaaaaaaaaaaaaaaaaaaaaaaaaaaaaaaaaaaaaaaaaaaaaaaugcaucccccccccccccccccccccccccccccccaaaggcucuuuucagagccaccagaauu

SEQ ID NO: 20915 - RNA, 1179 nt, Artificial Sequence
  mRNA product Design h-5 comprising derived and/or modified sequence from HRSV(Memphis-37)__AIY60637.1__P (opt4)
gggagagggcgcuuggcuugcaaggacccugagcugcggcauugaagcacacccaacccaacucgacugaagucagccucacugaaccggaucugagaaucuucucucucugggcuugccagggcucuccgaaccuagcuagcauccucuucaauuccaacuagaaagcuuaccauggagaaguucgcccccgaguuccacggcgaggacgccaacaacagagccaccaaguuccuggagagcaucaagggcaaguucaccagccccaaggaccccaagaagaaggacagcaucaucagcgugaacagcaucgacaucgaggugaccaaggagagccccaucaccagcaacagcaccaucaucaaccccaccaacgagaccgacgacaccgccggcaacaagcccaacuaccagagaaagccccuggugagcuucaaggaggaccccacccccagcgacaaccccuucagcaagcuguacaaggagaccaucgagaccuucgacaacaacgaggaggagagcagcuacagcuacgaggagaucaacgaccagaccaacgacaacaucaccgccagacuggacagaaucgacgagaagcugagcgagauccugggcaugcugcacacccuggugguggccagcgccggccccaccagcgccagagacggcaucagagacgccauggugggccugagagaggagaugaucgagaagaucagaaccgaggcccugaugaccaacgacagacuggaggccauggccagacugagaaacgaggagagcgagaagauggccaaggacaccagcgacgaggugagccugaaccccaccagcgagaagcugaacaaccugcuggagggcaacgacagcgacaacgaccugagccuggaggacuucugaggacuaguacuggcugcaucucccuuuccucuguccuccauccuucucccaggauggugaagggggaccugguacccagugauccccaccccaggauccuaaaucaugacuuaccugcuaauaaaaacucauuggaaaagugagaagaucuaaaaaaaaaaaaaaaaaaaaaaaaaaaaaaaaaaaaaaaaaaaaaaaaaaaaaaaaaaaaaaaaugcaucccccccccccccccccccccccccccccccaaaggcucuuuucagagccaccagaauu

SEQ ID NO: 20916 - RNA, 1179 nt, Artificial Sequence
  mRNA product Design h-5 comprising derived and/or modified sequence from HRSV(Memphis-37)__AIY60637.1__P (opt5)
gggagagggcgcuuggcuugcaaggacccugagcugcggcauugaagcacacccaacccaacucgacugaagucagccucacugaaccggaucugagaaucuucucucucugggcuugccagggcucuccgaaccuagcuagcauccucuucaauuccaacuagaaagcuuaccauggagaaguucgcccccgaauuucacggcgaggacgcuaacaauagagccaccaaauuccuggaaagcaucaaggggaaauuuacauccccuaaggauccgaaaaagaaggacucuauuaucagcgugaacuccauugauaucgaggucacgaaagaaucucccauuaccagcaauuccacaaucaucaacccuaccaaugagacagacgauaccgcgggaaacaagcccaauuaccagcggaaaccucucguuucuuucaaggaggaccccacaccuagcgauaacccguuuuccaaacuguauaaggaaaccauugagacguucgacaauaacgaagaggagagcucuuacuccuaugaagagaucaaugaucaaaccaacgacaauauuacagcucgccuugauagaaucgacgaaaagcugagcgagauucucggcaugcugcauacccuugugguggccucugccgggcccacauccgcucgggauggaauccgcgacgccauggucggccugagagaagagaugauugagaaaauccggaccgaagcucucaugacgaacgaccgccuggaggccauggcgagacugcggaaugaagagagcgaaaagauggccaaagauacaucugacgaggugucccucaacccuaccagcgagaagcugaacaaucuucuggaagggaacgauuccgacaaugaucucucucuggaggacuuuugaggacuaguacuggcugcaucucccuuuccucuguccuccauccuucucccaggauggugaagggggaccugguacccagugauccccaccccaggauccuaaaucaugacuuaccugcuaauaaaaacucauuggaaaagugagaagaucuaaaaaaaaaaaaaaaaaaaaaaaaaaaaaaaaaaaaaaaaaaaaaaaaaaaaaaaaaaaaaaaaugcaucccccccccccccccccccccccccccccccaaaggcucuuuucagagccaccagaauu

SEQ ID NO: 20917 - RNA, 1179 nt, Artificial Sequence
  mRNA product Design h-5 comprising derived and/or modified sequence from HRSV(Memphis-37)__AIY60637.1__P (opt6)
gggagagggcgcuuggcuugcaaggacccugagcugcggcauugaagcacacccaacccaacucgacugaagucagccucacugaaccggaucugagaaucuucucucucugggcuugccagggcucuccgaaccuagcuagcauccucuucaauuccaacuagaaagcuuaccauggaaaaauucgcaccagaauuccacggagaagacgcaaacaacagagcaacaaaauuccuagaaucaauaaaaggaaaauucacaagcccaaaagaucccaaaaaaaaagacucaaucauaagcguaaacucaauagauauagaaguaacaaaagaaaguccaauaacaagcaacaguacaauaauaaacccaacaaaugaaacagacgauacagcaggcaacaaaccaaacuaccaaagaaaaccgcuaguaaguuucaaagaagacccaacaccaagcgauaacccauuuucaaaauuauacaaagaaacaauagaaacauucgacaacaacgaagaagaaagcucauacucauacgaagaaauaaacgaccaaacaaacgacaacauaacagcgagauuagacagaauagacgaaaaacuaucagaaauacuaggcauguuacacacauuaguaguagcaagcgcaggaccaacaucagcaagagacggaauccgagacgcaaugguaggacuaagagaagaaaugauagaaaaaauaagaacagaagcacuaaugacaaacgacagacuagaagccauggcaagacuaagaaacgaagaaucagaaaaaauggcaaaagacacaucagacgaaguaucacuaaacccaacaagcgaaaaacuaaacaaccuauuagaaggaaacgacagcgacaacgaccuaucacucgaagacuucuaaggacuaguacuggcugcaucucccuuuccucuguccuccauccuucucccaggauggugaagggggaccugguacccagugauccccaccccaggauccuaaaucaugacuuaccugcuaauaaaaacucauuggaaaagugagaagaucuaaaaaaaaaaaaaaaaaaaaaaaaaaaaaaaaaaaaaaaaaaaaaaaaaaaaaaaaaaaaaaaaugcaucccccccccccccccccccccccccccccccaaaggcucuuuucagagccaccagaauu

SEQ ID NO: 20918 - RNA, 1179 nt, Artificial Sequence
  mRNA product Design h-5 comprising derived and/or modified sequence from HRSV(Memphis-37)__AIY60637.1__P (opt11)
gggagagggcgcuuggcuugcaaggacccugagcugcggcauugaagcacacccaacccaacucgacugaagucagccucacugaaccggaucugagaaucuucucucucugggcuugccagggcucuccgaaccuagcuagcauccucuucaauuccaacuagaaagcuuaccauggaaaaauucgccccagaauuucacggcgaagacgccaacaaccgagccaccaaauuccucgaaucaauaaaaggcaaauucacaucccccaaagaccccaaaaaaaaagacucgaucaucuccgugaacucaaucgacauagaagucaccaaagaaagccccaucaccuccaacagcaccaucaucaaccccacaaacgaaacagacgacaccgccggcaacaaaccaaacuaccaacgaaaaccccucgucagcuucaaagaagaccccacaccaagcgacaaccccuucuccaaacucuacaaagaaacaauagaaaccuucgacaacaacgaagaagaaagcucguacucauacgaagaaaucaacgaccaaaccaacgacaacaucaccgcccgccucgaccgcaucgacgaaaaacucuccgaaauccucggaaugcuccacacacucgucgucgccagcgccggccccaccucagcccgggacggcauccgcgacgccauggugggccuccgcgaggaaaugaucgaaaaaauccgcacagaagcccucaugaccaacgaccgccucgaagccauggcccgccuccgcaacgaagaauccgaaaaaauggccaaagacaccuccgacgaagucucacuaaaccccaccuccgaaaaacuaaacaaccuccuagaaggcaacgacagcgacaacgaccucucccuagaagacuucuaaggacuaguacuggcugcaucucccuuuccucuguccuccauccuucucccaggauggugaagggggaccugguacccagugauccccaccccaggauccuaaaucaugacuuaccugcuaauaaaaacucauuggaaaagugagaagaucuaaaaaaaaaaaaaaaaaaaaaaaaaaaaaaaaaaaaaaaaaaaaaaaaaaaaaaaaaaaaaaaaugcaucccccccccccccccccccccccccccccccaaaggcucuuuucagagccaccagaauu

SEQ ID NO: 20919 - RNA, 1112 nt, Artificial Sequence
  mRNA product Design i-1 comprising derived and/or modified sequence from HRSV(Memphis-37)__AIY60637.1__P (wt)
gggagagggcgcuuggcuugcaaggacccugagcugcggcauugaagcacacccaacccaacucgacugaagucagccucacugaaccggaucugagaaucuucucucucugggcuugccagggcucuccgaaccuagcuagcauccucuucaauuccaacuagaaagcuuaccauggaaaaguuugcuccugaauuccauggagaagacgcaaacaacagagccacuaaauuccuagaaucaauaaagggcaaauucacaucaccuaaagaucccaagaaaaaagauaguaucauaucugucaacucaauagauauagaaguaaccaaagaaagcccuauaacuucaaauucaaccauuauaaacccuacaaaugagacagaugauacugcagggaacaagcccaauuaucaaagaaaaccacuagugaguuucaaagaagacccuacgccaagugauaaucccuuuucaaaacuauacaaagaaaccauagaaacauuugauaacaaugaagaagaaucuagcuauucauaugaagaaauaaaugaucagacaaacgauaauauaacagcaagauuagauaggauugaugaaaaauuaagugaaauacuaggaaugcuucacacacuaguaguagcaagugcaggaccuacaucugcucgggaugguauaagagaugccaugguugguuuaagagaagaaaugauagaaaaaaucagaacugaagcauugaugaccaaugauagauuagaagcuauggcaagacucaggaaugaggaaagugaaaagauggcaaaagacacaucagaugaagugucucucaauccaacaucagagaaauugaacaaccuguuggaaggaaaugauagugauaaugaucuaucacuugaagauuucugaggacuaguguccaccugucccuccugggcugcuggauugucucguuuuccugccaaauaaacaggaucagcgcuuuacagaucuaaaaaaaaaaaaaaaaaaaaaaaaaaaaaaaaaaaaaaaaaaaaaaaaaaaaaaaaaaaaaaaaugcaucccccccccccccccccccccccccccccccaaaggcucuuuucagagccaccagaauu

SEQ ID NO: 20920 - RNA, 1112 nt, Artificial Sequence
  mRNA product Design i-1 comprising derived and/or modified sequence from HRSV(Memphis-37)__AIY60637.1__P (opt1)
gggagagggcgcuuggcuugcaaggacccugagcugcggcauugaagcacacccaacccaacucgacugaagucagccucacugaaccggaucugagaaucuucucucucugggcuugccagggcucuccgaaccuagcuagcauccucuucaauuccaacuagaaagcuuaccauggagaaguucgcccccgaguuccacggcgaggacgccaacaaccgcgcgaccaaguuccuggagagcaucaaggggaaguucaccuccccgaaggaccccaagaagaaggacagcaucaucuccgugaacagcaucgacaucgaggucacgaaggagucccccaucaccagcaacuccaccaucaucaaccccaccaacgagacggacgacaccgccggcaacaagccgaacuaccagcggaagccccucgugagcuucaaggaggaccccacccccuccgacaacccguucagcaagcuguacaaggagaccaucgagacguucgacaacaacgaggaggaguccagcuacuccuacgaggagaucaacgaccagaccaacgacaacaucaccgcccgccuggaccggaucgacgagaagcucagcgagauccuggggaugcugcacacccucguggucgccuccgccggccccacgagcgcgcgcgacgggauccgggacgccauggugggccugcgcgaggagaugaucgagaagauccggaccgaggcccugaugaccaacgaccgccucgaggccauggcgcggcugcgcaacgaggaguccgagaagauggccaaggacaccagcgacgaggugucccugaaccccacgagcgagaagcucaacaaccugcuggagggcaacgacagcgacaacgaccucucccuggaggacuucugaggacuaguguccaccugucccuccugggcugcuggauugucucguuuuccugccaaauaaacaggaucagcgcuuuacagaucuaaaaaaaaaaaaaaaaaaaaaaaaaaaaaaaaaaaaaaaaaaaaaaaaaaaaaaaaaaaaaaaaugcaucccccccccccccccccccccccccccccccaaaggcucuuuucagagccaccagaauu

SEQ ID NO: 20921 - RNA, 1112 nt, Artificial Sequence
  mRNA product Design i-1 comprising derived and/or modified sequence from HRSV(Memphis-37)__AIY60637.1__P (opt2)
gggagagggcgcuuggcuugcaaggacccugagcugcggcauugaagcacacccaacccaacucgacugaagucagccucacugaaccggaucugagaaucuucucucucugggcuugccagggcucuccgaaccuagcuagcauccucuucaauuccaacuagaaagcuuaccauggagaaguucgcccccgaguuccacggcgaggacgccaacaaccgcgccaccaaguuccucgaguccaucaagggcaaguucaccucccccaaggaccccaagaagaaggacuccaucaucuccgucaacuccaucgacaucgaggucaccaaggagucccccaucaccuccaacuccaccaucaucaaccccaccaacgagaccgacgacaccgccggcaacaagcccaacuaccagcgcaagccccucgucuccuucaaggaggaccccacccccuccgacaaccccuucuccaagcucuacaaggagaccaucgagaccuucgacaacaacgaggaggaguccuccuacuccuacgaggagaucaacgaccagaccaacgacaacaucaccgcccgccucgaccgcaucgacgagaagcucuccgagauccucggcaugcuccacacccucgucgucgccuccgccggccccaccuccgcccgcgacggcauccgcgacgccauggucggccuccgcgaggagaugaucgagaagauccgcaccgaggcccucaugaccaacgaccgccucgaggccauggcccgccuccgcaacgaggaguccgagaagauggccaaggacaccuccgacgaggucucccucaaccccaccuccgagaagcucaacaaccuccucgagggcaacgacuccgacaacgaccucucccucgaggacuucugaggacuaguguccaccugucccuccugggcugcuggauugucucguuuuccugccaaauaaacaggaucagcgcuuuacagaucuaaaaaaaaaaaaaaaaaaaaaaaaaaaaaaaaaaaaaaaaaaaaaaaaaaaaaaaaaaaaaaaaugcaucccccccccccccccccccccccccccccccaaaggcucuuuucagagccaccagaauu

SEQ ID NO: 20922 - RNA, 1112 nt, Artificial Sequence
  mRNA product Design i-1 comprising derived and/or modified sequence from HRSV(Memphis-37)__AIY60637.1__P (opt3)
gggagagggcgcuuggcuugcaaggacccugagcugcggcauugaagcacacccaacccaacucgacugaagucagccucacugaaccggaucugagaaucuucucucucugggcuugccagggcucuccgaaccuagcuagcauccucuucaauuccaacuagaaagcuuaccauggagaaguucgcccccgaauuucacggcgaggacgcuaacaauagagcaaccaaauuccuggaaagcaucaaggggaaauuuacauccccuaaggauccgaaaaagaaggacucuauuauaucagugaacaguaucgauauugaggucacuaaagaaagcccaaucacguccaauucuaccauuaucaaccccacaaaugagacugacgauaccgccggaaacaagccuaauuaccagaggaaaccacucguuucguucaaggaggaccccacaccuucagauaacccauuuagcaaacuuuauaaggaaaccauagagacuuucgacaauaacgaagaggagaguuccuacucuuaugaagagaucaaugaucaaacaaacgacaauauuaccgcgcggcuggaucgcaucgacgaaaaguugagcgagauuuuagguaugcugcauacgcuagugguagcuuccgccggccccacuucagcacgagaugggauccgugacgccauggugggacucagagaagagaugauagagaaaauuaggaccgaagcucugaugacaaacgaccggcuugaggcaauggcccgccugagaaaugaagagagugaaaagauggcuaaagauacuagcgacgaggucucuuugaacccuaccuccgagaagcucaacaaucugcuggaaggcaacgauucagacaaugaucucagcuuagaggacuuuugaggacuaguguccaccugucccuccugggcugcuggauugucucguuuuccugccaaauaaacaggaucagcgcuuuacagaucuaaaaaaaaaaaaaaaaaaaaaaaaaaaaaaaaaaaaaaaaaaaaaaaaaaaaaaaaaaaaaaaaugcaucccccccccccccccccccccccccccccccaaaggcucuuuucagagccaccagaauu

SEQ ID NO: 20923 - RNA, 1112 nt, Artificial Sequence
  mRNA product Design i-1 comprising derived and/or modified sequence from HRSV(Memphis-37)__AIY60637.1__P (opt4)
gggagagggcgcuuggcuugcaaggacccugagcugcggcauugaagcacacccaacccaacucgacugaagucagccucacugaaccggaucugagaaucuucucucucugggcuugccagggcucuccgaaccuagcuagcauccucuucaauuccaacuagaaagcuuaccauggagaaguucgcccccgaguuccacggcgaggacgccaacaacagagccaccaaguuccuggagagcaucaagggcaaguucaccagccccaaggaccccaagaagaaggacagcaucaucagcgugaacagcaucgacaucgaggugaccaaggagagccccaucaccagcaacagcaccaucaucaaccccaccaacgagaccgacgacaccgccggcaacaagcccaacuaccagagaaagccccuggugagcuucaaggaggaccccacccccagcgacaaccccuucagcaagcuguacaaggagaccaucgagaccuucgacaacaacgaggaggagagcagcuacagcuacgaggagaucaacgaccagaccaacgacaacaucaccgccagacuggacagaaucgacgagaagcugagcgagauccugggcaugcugcacacccuggugguggccagcgccggccccaccagcgccagagacggcaucagagacgccauggugggccugagagaggagaugaucgagaagaucagaaccgaggcccugaugaccaacgacagacuggaggccauggccagacugagaaacgaggagagcgagaagauggccaaggacaccagcgacgaggugagccugaaccccaccagcgagaagcugaacaaccugcuggagggcaacgacagcgacaacgaccugagccuggaggacuucugaggacuaguguccaccugucccuccugggcugcuggauugucucguuuuccugccaaauaaacaggaucagcgcuuuacagaucuaaaaaaaaaaaaaaaaaaaaaaaaaaaaaaaaaaaaaaaaaaaaaaaaaaaaaaaaaaaaaaaaugcaucccccccccccccccccccccccccccccccaaaggcucuuuucagagccaccagaauu

SEQ ID NO: 20924 - RNA, 1112 nt, Artificial Sequence
  mRNA product Design i-1 comprising derived and/or modified sequence from HRSV(Memphis-37)__AIY60637.1__P (opt5)
gggagagggcgcuuggcuugcaaggacccugagcugcggcauugaagcacacccaacccaacucgacugaagucagccucacugaaccggaucugagaaucuucucucucugggcuugccagggcucuccgaaccuagcuagcauccucuucaauuccaacuagaaagcuuaccauggagaaguucgcccccgaauuucacggcgaggacgcuaacaauagagccaccaaauuccuggaaagcaucaaggggaaauuuacauccccuaaggauccgaaaaagaaggacucuauuaucagcgugaacuccauugauaucgaggucacgaaagaaucucccauuaccagcaauuccacaaucaucaacccuaccaaugagacagacgauaccgcgggaaacaagcccaauuaccagcggaaaccucucguuucuuucaaggaggaccccacaccuagcgauaacccguuuuccaaacuguauaaggaaaccauugagacguucgacaauaacgaagaggagagcucuuacuccuaugaagagaucaaugaucaaaccaacgacaauauuacagcucgccuugauagaaucgacgaaaagcugagcgagauucucggcaugcugcauacccuugugguggccucugccgggcccacauccgcucgggauggaauccgcgacgccauggucggccugagagaagagaugauugagaaaauccggaccgaagcucucaugacgaacgaccgccuggaggccauggcgagacugcggaaugaagagagcgaaaagauggccaaagauacaucugacgaggugucccucaacccuaccagcgagaagcugaacaaucuucuggaagggaacgauuccgacaaugaucucucucuggaggacuuuugaggacuaguguccaccugucccuccugggcugcuggauugucucguuuuccugccaaauaaacaggaucagcgcuuuacagaucuaaaaaaaaaaaaaaaaaaaaaaaaaaaaaaaaaaaaaaaaaaaaaaaaaaaaaaaaaaaaaaaaugcaucccccccccccccccccccccccccccccccaaaggcucuuuucagagccaccagaauu

SEQ ID NO: 20925 - RNA, 1112 nt, Artificial Sequence
  mRNA product Design i-1 comprising derived and/or modified sequence from HRSV(Memphis-37)__AIY60637.1__P (opt6)
gggagagggcgcuuggcuugcaaggacccugagcugcggcauugaagcacacccaacccaacucgacugaagucagccucacugaaccggaucugagaaucuucucucucugggcuugccagggcucuccgaaccuagcuagcauccucuucaauuccaacuagaaagcuuaccauggaaaaauucgcaccagaauuccacggagaagacgcaaacaacagagcaacaaaauuccuagaaucaauaaaaggaaaauucacaagcccaaaagaucccaaaaaaaaagacucaaucauaagcguaaacucaauagauauagaaguaacaaaagaaaguccaauaacaagcaacaguacaauaauaaacccaacaaaugaaacagacgauacagcaggcaacaaaccaaacuaccaaagaaaaccgcuaguaaguuucaaagaagacccaacaccaagcgauaacccauuuucaaaauuauacaaagaaacaauagaaacauucgacaacaacgaagaagaaagcucauacucauacgaagaaauaaacgaccaaacaaacgacaacauaacagcgagauuagacagaauagacgaaaaacuaucagaaauacuaggcauguuacacacauuaguaguagcaagcgcaggaccaacaucagcaagagacggaauccgagacgcaaugguaggacuaagagaagaaaugauagaaaaaauaagaacagaagcacuaaugacaaacgacagacuagaagccauggcaagacuaagaaacgaagaaucagaaaaaauggcaaaagacacaucagacgaaguaucacuaaacccaacaagcgaaaaacuaaacaaccuauuagaaggaaacgacagcgacaacgaccuaucacucgaagacuucuaaggacuaguguccaccugucccuccugggcugcuggauugucucguuuuccugccaaauaaacaggaucagcgcuuuacagaucuaaaaaaaaaaaaaaaaaaaaaaaaaaaaaaaaaaaaaaaaaaaaaaaaaaaaaaaaaaaaaaaaugcaucccccccccccccccccccccccccccccccaaaggcucuuuucagagccaccagaauu

SEQ ID NO: 20926 - RNA, 1112 nt, Artificial Sequence
  mRNA product Design i-1 comprising derived and/or modified sequence from HRSV(Memphis-37)__AIY60637.1__P (opt11)
gggagagggcgcuuggcuugcaaggacccugagcugcggcauugaagcacacccaacccaacucgacugaagucagccucacugaaccggaucugagaaucuucucucucugggcuugccagggcucuccgaaccuagcuagcauccucuucaauuccaacuagaaagcuuaccauggaaaaauucgccccagaauuucacggcgaagacgccaacaaccgagccaccaaauuccucgaaucaauaaaaggcaaauucacaucccccaaagaccccaaaaaaaaagacucgaucaucuccgugaacucaaucgacauagaagucaccaaagaaagccccaucaccuccaacagcaccaucaucaaccccacaaacgaaacagacgacaccgccggcaacaaaccaaacuaccaacgaaaaccccucgucagcuucaaagaagaccccacaccaagcgacaaccccuucuccaaacucuacaaagaaacaauagaaaccuucgacaacaacgaagaagaaagcucguacucauacgaagaaaucaacgaccaaaccaacgacaacaucaccgcccgccucgaccgcaucgacgaaaaacucuccgaaauccucggaaugcuccacacacucgucgucgccagcgccggccccaccucagcccgggacggcauccgcgacgccauggugggccuccgcgaggaaaugaucgaaaaaauccgcacagaagcccucaugaccaacgaccgccucgaagccauggcccgccuccgcaacgaagaauccgaaaaaauggccaaagacaccuccgacgaagucucacuaaaccccaccuccgaaaaacuaaacaaccuccuagaaggcaacgacagcgacaacgaccucucccuagaagacuucuaaggacuaguguccaccugucccuccugggcugcuggauugucucguuuuccugccaaauaaacaggaucagcgcuuuacagaucuaaaaaaaaaaaaaaaaaaaaaaaaaaaaaaaaaaaaaaaaaaaaaaaaaaaaaaaaaaaaaaaaugcaucccccccccccccccccccccccccccccccaaaggcucuuuucagagccaccagaauu

SEQ ID NO: 20927 - RNA, 1112 nt, Artificial Sequence
  mRNA product Design i-2 comprising derived and/or modified sequence from HRSV(Memphis-37)__AIY60637.1__P (wt)
gggagaggcgcugccuacggagguggcagccaucuccuucucggcaucaagcuuaccauggaaaaguuugcuccugaauuccauggagaagacgcaaacaacagagccacuaaauuccuagaaucaauaaagggcaaauucacaucaccuaaagaucccaagaaaaaagauaguaucauaucugucaacucaauagauauagaaguaaccaaagaaagcccuauaacuucaaauucaaccauuauaaacccuacaaaugagacagaugauacugcagggaacaagcccaauuaucaaagaaaaccacuagugaguuucaaagaagacccuacgccaagugauaaucccuuuucaaaacuauacaaagaaaccauagaaacauuugauaacaaugaagaagaaucuagcuauucauaugaagaaauaaaugaucagacaaacgauaauauaacagcaagauuagauaggauugaugaaaaauuaagugaaauacuaggaaugcuucacacacuaguaguagcaagugcaggaccuacaucugcucgggaugguauaagagaugccaugguugguuuaagagaagaaaugauagaaaaaaucagaacugaagcauugaugaccaaugauagauuagaagcuauggcaagacucaggaaugaggaaagugaaaagauggcaaaagacacaucagaugaagugucucucaauccaacaucagagaaauugaacaaccuguuggaaggaaaugauagugauaaugaucuaucacuugaagauuucugaggacuagugcaucacauuuaaaagcaucucagccuaccaugagaauaagagaaagaaaaugaagaucaauagcuuauucaucucuuuuucuuuuucguugguguaaagccaacacccugucuaaaaaacauaaauuucuuuaaucauuuugccucuuuucucugugcuucaauuaauaaaaaauggaaagaaccuagaucuaaaaaaaaaaaaaaaaaaaaaaaaaaaaaaaaaaaaaaaaaaaaaaaaaaaaaaaaaaaaaaaaugcaucccccccccccccccccccccccccccccccaaaggcucuuuucagagccaccagaauu

SEQ ID NO: 20928 - RNA, 1112 nt, Artificial Sequence
  mRNA product Design i-2 comprising derived and/or modified sequence from HRSV(Memphis-37)__AIY60637.1__P (opt1)
gggagaggcgcugccuacggagguggcagccaucuccuucucggcaucaagcuuaccauggagaaguucgcccccgaguuccacggcgaggacgccaacaaccgcgcgaccaaguuccuggagagcaucaaggggaaguucaccuccccgaaggaccccaagaagaaggacagcaucaucuccgugaacagcaucgacaucgaggucacgaaggagucccccaucaccagcaacuccaccaucaucaaccccaccaacgagacggacgacaccgccggcaacaagccgaacuaccagcggaagccccucgugagcuucaaggaggaccccacccccuccgacaacccguucagcaagcuguacaaggagaccaucgagacguucgacaacaacgaggaggaguccagcuacuccuacgaggagaucaacgaccagaccaacgacaacaucaccgcccgccuggaccggaucgacgagaagcucagcgagauccuggggaugcugcacacccucguggucgccuccgccggccccacgagcgcgcgcgacgggauccgggacgccauggugggccugcgcgaggagaugaucgagaagauccggaccgaggcccugaugaccaacgaccgccucgaggccauggcgcggcugcgcaacgaggaguccgagaagauggccaaggacaccagcgacgaggugucccugaaccccacgagcgagaagcucaacaaccugcuggagggcaacgacagcgacaacgaccucucccuggaggacuucugaggacuagugcaucacauuuaaaagcaucucagccuaccaugagaauaagagaaagaaaaugaagaucaauagcuuauucaucucuuuuucuuuuucguugguguaaagccaacacccugucuaaaaaacauaaauuucuuuaaucauuuugccucuuuucucugugcuucaauuaauaaaaaauggaaagaaccuagaucuaaaaaaaaaaaaaaaaaaaaaaaaaaaaaaaaaaaaaaaaaaaaaaaaaaaaaaaaaaaaaaaaugcaucccccccccccccccccccccccccccccccaaaggcucuuuucagagccaccagaauu

SEQ ID NO: 20929 - RNA, 1112 nt, Artificial Sequence
  mRNA product Design i-2 comprising derived and/or modified sequence from HRSV(Memphis-37)__AIY60637.1__P (opt2)
gggagaggcgcugccuacggagguggcagccaucuccuucucggcaucaagcuuaccauggagaaguucgcccccgaguuccacggcgaggacgccaacaaccgcgccaccaaguuccucgaguccaucaagggcaaguucaccucccccaaggaccccaagaagaaggacuccaucaucuccgucaacuccaucgacaucgaggucaccaaggagucccccaucaccuccaacuccaccaucaucaaccccaccaacgagaccgacgacaccgccggcaacaagcccaacuaccagcgcaagccccucgucuccuucaaggaggaccccacccccuccgacaaccccuucuccaagcucuacaaggagaccaucgagaccuucgacaacaacgaggaggaguccuccuacuccuacgaggagaucaacgaccagaccaacgacaacaucaccgcccgccucgaccgcaucgacgagaagcucuccgagauccucggcaugcuccacacccucgucgucgccuccgccggccccaccuccgcccgcgacggcauccgcgacgccauggucggccuccgcgaggagaugaucgagaagauccgcaccgaggcccucaugaccaacgaccgccucgaggccauggcccgccuccgcaacgaggaguccgagaagauggccaaggacaccuccgacgaggucucccucaaccccaccuccgagaagcucaacaaccuccucgagggcaacgacuccgacaacgaccucucccucgaggacuucugaggacuagugcaucacauuuaaaagcaucucagccuaccaugagaauaagagaaagaaaaugaagaucaauagcuuauucaucucuuuuucuuuuucguugguguaaagccaacacccugucuaaaaaacauaaauuucuuuaaucauuuugccucuuuucucugugcuucaauuaauaaaaaauggaaagaaccuagaucuaaaaaaaaaaaaaaaaaaaaaaaaaaaaaaaaaaaaaaaaaaaaaaaaaaaaaaaaaaaaaaaaugcaucccccccccccccccccccccccccccccccaaaggcucuuuucagagccaccagaauu

SEQ ID NO: 20930 - RNA, 1112 nt, Artificial Sequence
  mRNA product Design i-2 comprising derived and/or modified sequence from HRSV(Memphis-37)__AIY60637.1__P (opt3)
gggagaggcgcugccuacggagguggcagccaucuccuucucggcaucaagcuuaccauggagaaguucgcccccgaauuucacggcgaggacgcuaacaauagagcaaccaaauuccuggaaagcaucaaggggaaauuuacauccccuaaggauccgaaaaagaaggacucuauuauaucagugaacaguaucgauauugaggucacuaaagaaagcccaaucacguccaauucuaccauuaucaaccccacaaaugagacugacgauaccgccggaaacaagccuaauuaccagaggaaaccacucguuucguucaaggaggaccccacaccuucagauaacccauuuagcaaacuuuauaaggaaaccauagagacuuucgacaauaacgaagaggagaguuccuacucuuaugaagagaucaaugaucaaacaaacgacaauauuaccgcgcggcuggaucgcaucgacgaaaaguugagcgagauuuuagguaugcugcauacgcuagugguagcuuccgccggccccacuucagcacgagaugggauccgugacgccauggugggacucagagaagagaugauagagaaaauuaggaccgaagcucugaugacaaacgaccggcuugaggcaauggcccgccugagaaaugaagagagugaaaagauggcuaaagauacuagcgacgaggucucuuugaacccuaccuccgagaagcucaacaaucugcuggaaggcaacgauucagacaaugaucucagcuuagaggacuuuugaggacuagugcaucacauuuaaaagcaucucagccuaccaugagaauaagagaaagaaaaugaagaucaauagcuuauucaucucuuuuucuuuuucguugguguaaagccaacacccugucuaaaaaacauaaauuucuuuaaucauuuugccucuuuucucugugcuucaauuaauaaaaaauggaaagaaccuagaucuaaaaaaaaaaaaaaaaaaaaaaaaaaaaaaaaaaaaaaaaaaaaaaaaaaaaaaaaaaaaaaaaugcaucccccccccccccccccccccccccccccccaaaggcucuuuucagagccaccagaauu

SEQ ID NO: 20931 - RNA, 1112 nt, Artificial Sequence
  mRNA product Design i-2 comprising derived and/or modified sequence from HRSV(Memphis-37)__AIY60637.1__P (opt4)
gggagaggcgcugccuacggagguggcagccaucuccuucucggcaucaagcuuaccauggagaaguucgcccccgaguuccacggcgaggacgccaacaacagagccaccaaguuccuggagagcaucaagggcaaguucaccagccccaaggaccccaagaagaaggacagcaucaucagcgugaacagcaucgacaucgaggugaccaaggagagccccaucaccagcaacagcaccaucaucaaccccaccaacgagaccgacgacaccgccggcaacaagcccaacuaccagagaaagccccuggugagcuucaaggaggaccccacccccagcgacaaccccuucagcaagcuguacaaggagaccaucgagaccuucgacaacaacgaggaggagagcagcuacagcuacgaggagaucaacgaccagaccaacgacaacaucaccgccagacuggacagaaucgacgagaagcugagcgagauccugggcaugcugcacacccuggugguggccagcgccggccccaccagcgccagagacggcaucagagacgccauggugggccugagagaggagaugaucgagaagaucagaaccgaggcccugaugaccaacgacagacuggaggccauggccagacugagaaacgaggagagcgagaagauggccaaggacaccagcgacgaggugagccugaaccccaccagcgagaagcugaacaaccugcuggagggcaacgacagcgacaacgaccugagccuggaggacuucugaggacuagugcaucacauuuaaaagcaucucagccuaccaugagaauaagagaaagaaaaugaagaucaauagcuuauucaucucuuuuucuuuuucguugguguaaagccaacacccugucuaaaaaacauaaauuucuuuaaucauuuugccucuuuucucugugcuucaauuaauaaaaaauggaaagaaccuagaucuaaaaaaaaaaaaaaaaaaaaaaaaaaaaaaaaaaaaaaaaaaaaaaaaaaaaaaaaaaaaaaaaugcaucccccccccccccccccccccccccccccccaaaggcucuuuucagagccaccagaauu

SEQ ID NO: 20932 - RNA, 1112 nt, Artificial Sequence
  mRNA product Design i-2 comprising derived and/or modified sequence from HRSV(Memphis-37)__AIY60637.1__P (opt5)
gggagaggcgcugccuacggagguggcagccaucuccuucucggcaucaagcuuaccauggagaaguucgcccccgaauuucacggcgaggacgcuaacaauagagccaccaaauuccuggaaagcaucaaggggaaauuuacauccccuaaggauccgaaaaagaaggacucuauuaucagcgugaacuccauugauaucgaggucacgaaagaaucucccauuaccagcaauuccacaaucaucaacccuaccaaugagacagacgauaccgcgggaaacaagcccaauuaccagcggaaaccucucguuucuuucaaggaggaccccacaccuagcgauaacccguuuuccaaacuguauaaggaaaccauugagacguucgacaauaacgaagaggagagcucuuacuccuaugaagagaucaaugaucaaaccaacgacaauauuacagcucgccuugauagaaucgacgaaaagcugagcgagauucucggcaugcugcauacccuugugguggccucugccgggcccacauccgcucgggauggaauccgcgacgccauggucggccugagagaagagaugauugagaaaauccggaccgaagcucucaugacgaacgaccgccuggaggccauggcgagacugcggaaugaagagagcgaaaagauggccaaagauacaucugacgaggugucccucaacccuaccagcgagaagcugaacaaucuucuggaagggaacgauuccgacaaugaucucucucuggaggacuuuugaggacuagugcaucacauuuaaaagcaucucagccuaccaugagaauaagagaaagaaaaugaagaucaauagcuuauucaucucuuuuucuuuuucguugguguaaagccaacacccugucuaaaaaacauaaauuucuuuaaucauuuugccucuuuucucugugcuucaauuaauaaaaaauggaaagaaccuagaucuaaaaaaaaaaaaaaaaaaaaaaaaaaaaaaaaaaaaaaaaaaaaaaaaaaaaaaaaaaaaaaaaugcaucccccccccccccccccccccccccccccccaaaggcucuuuucagagccaccagaauu

SEQ ID NO: 20933 - RNA, 1112 nt, Artificial Sequence
  mRNA product Design i-2 comprising derived and/or modified sequence from HRSV(Memphis-37)__AIY60637.1__P (opt6)
gggagaggcgcugccuacggagguggcagccaucuccuucucggcaucaagcuuaccauggaaaaauucgcaccagaauuccacggagaagacgcaaacaacagagcaacaaaauuccuagaaucaauaaaaggaaaauucacaagcccaaaagaucccaaaaaaaaagacucaaucauaagcguaaacucaauagauauagaaguaacaaaagaaaguccaauaacaagcaacaguacaauaauaaacccaacaaaugaaacagacgauacagcaggcaacaaaccaaacuaccaaagaaaaccgcuaguaaguuucaaagaagacccaacaccaagcgauaacccauuuucaaaauuauacaaagaaacaauagaaacauucgacaacaacgaagaagaaagcucauacucauacgaagaaauaaacgaccaaacaaacgacaacauaacagcgagauuagacagaauagacgaaaaacuaucagaaauacuaggcauguuacacacauuaguaguagcaagcgcaggaccaacaucagcaagagacggaauccgagacgcaaugguaggacuaagagaagaaaugauagaaaaaauaagaacagaagcacuaaugacaaacgacagacuagaagccauggcaagacuaagaaacgaagaaucagaaaaaauggcaaaagacacaucagacgaaguaucacuaaacccaacaagcgaaaaacuaaacaaccuauuagaaggaaacgacagcgacaacgaccuaucacucgaagacuucuaaggacuagugcaucacauuuaaaagcaucucagccuaccaugagaauaagagaaagaaaaugaagaucaauagcuuauucaucucuuuuucuuuuucguugguguaaagccaacacccugucuaaaaaacauaaauuucuuuaaucauuuugccucuuuucucugugcuucaauuaauaaaaaauggaaagaaccuagaucuaaaaaaaaaaaaaaaaaaaaaaaaaaaaaaaaaaaaaaaaaaaaaaaaaaaaaaaaaaaaaaaaugcaucccccccccccccccccccccccccccccccaaaggcucuuuucagagccaccagaauu

SEQ ID NO: 20934 - RNA, 1112 nt, Artificial Sequence
  mRNA product Design i-2 comprising derived and/or modified sequence from HRSV(Memphis-37)__AIY60637.1__P (opt11)
gggagaggcgcugccuacggagguggcagccaucuccuucucggcaucaagcuuaccauggaaaaauucgccccagaauuucacggcgaagacgccaacaaccgagccaccaaauuccucgaaucaauaaaaggcaaauucacaucccccaaagaccccaaaaaaaaagacucgaucaucuccgugaacucaaucgacauagaagucaccaaagaaagccccaucaccuccaacagcaccaucaucaaccccacaaacgaaacagacgacaccgccggcaacaaaccaaacuaccaacgaaaaccccucgucagcuucaaagaagaccccacaccaagcgacaaccccuucuccaaacucuacaaagaaacaauagaaaccuucgacaacaacgaagaagaaagcucguacucauacgaagaaaucaacgaccaaaccaacgacaacaucaccgcccgccucgaccgcaucgacgaaaaacucuccgaaauccucggaaugcuccacacacucgucgucgccagcgccggccccaccucagcccgggacggcauccgcgacgccauggugggccuccgcgaggaaaugaucgaaaaaauccgcacagaagcccucaugaccaacgaccgccucgaagccauggcccgccuccgcaacgaagaauccgaaaaaauggccaaagacaccuccgacgaagucucacuaaaccccaccuccgaaaaacuaaacaaccuccuagaaggcaacgacagcgacaacgaccucucccuagaagacuucuaaggacuagugcaucacauuuaaaagcaucucagccuaccaugagaauaagagaaagaaaaugaagaucaauagcuuauucaucucuuuuucuuuuucguugguguaaagccaacacccugucuaaaaaacauaaauuucuuuaaucauuuugccucuuuucucugugcuucaauuaauaaaaaauggaaagaaccuagaucuaaaaaaaaaaaaaaaaaaaaaaaaaaaaaaaaaaaaaaaaaaaaaaaaaaaaaaaaaaaaaaaaugcaucccccccccccccccccccccccccccccccaaaggcucuuuucagagccaccagaauu

SEQ ID NO: 20935 - RNA, 1108 nt, Artificial Sequence
  mRNA product Design i-2 comprising derived and/or modified sequence from HRSV(Memphis-37)__AIY60637.1__P (wt)
ggggcgcugccuacggagguggcagccaucuccuucucggcaucaagcuuaccauggaaaaguuugcuccugaauuccauggagaagacgcaaacaacagagccacuaaauuccuagaaucaauaaagggcaaauucacaucaccuaaagaucccaagaaaaaagauaguaucauaucugucaacucaauagauauagaaguaaccaaagaaagcccuauaacuucaaauucaaccauuauaaacccuacaaaugagacagaugauacugcagggaacaagcccaauuaucaaagaaaaccacuagugaguuucaaagaagacccuacgccaagugauaaucccuuuucaaaacuauacaaagaaaccauagaaacauuugauaacaaugaagaagaaucuagcuauucauaugaagaaauaaaugaucagacaaacgauaauauaacagcaagauuagauaggauugaugaaaaauuaagugaaauacuaggaaugcuucacacacuaguaguagcaagugcaggaccuacaucugcucgggaugguauaagagaugccaugguugguuuaagagaagaaaugauagaaaaaaucagaacugaagcauugaugaccaaugauagauuagaagcuauggcaagacucaggaaugaggaaagugaaaagauggcaaaagacacaucagaugaagugucucucaauccaacaucagagaaauugaacaaccuguuggaaggaaaugauagugauaaugaucuaucacuugaagauuucugaggacuagugcaucacauuuaaaagcaucucagccuaccaugagaauaagagaaagaaaaugaagaucaauagcuuauucaucucuuuuucuuuuucguugguguaaagccaacacccugucuaaaaaacauaaauuucuuuaaucauuuugccucuuuucucugugcuucaauuaauaaaaaauggaaagaaccuagaucuaaaaaaaaaaaaaaaaaaaaaaaaaaaaaaaaaaaaaaaaaaaaaaaaaaaaaaaaaaaaaaaaugcaucccccccccccccccccccccccccccccccaaaggcucuuuucagagccaccagaauu

SEQ ID NO: 20936 - RNA, 1108 nt, Artificial Sequence
  mRNA product Design i-2 comprising derived and/or modified sequence from HRSV(Memphis-37)__AIY60637.1__P (opt1)
ggggcgcugccuacggagguggcagccaucuccuucucggcaucaagcuuaccauggagaaguucgcccccgaguuccacggcgaggacgccaacaaccgcgcgaccaaguuccuggagagcaucaaggggaaguucaccuccccgaaggaccccaagaagaaggacagcaucaucuccgugaacagcaucgacaucgaggucacgaaggagucccccaucaccagcaacuccaccaucaucaaccccaccaacgagacggacgacaccgccggcaacaagccgaacuaccagcggaagccccucgugagcuucaaggaggaccccacccccuccgacaacccguucagcaagcuguacaaggagaccaucgagacguucgacaacaacgaggaggaguccagcuacuccuacgaggagaucaacgaccagaccaacgacaacaucaccgcccgccuggaccggaucgacgagaagcucagcgagauccuggggaugcugcacacccucguggucgccuccgccggccccacgagcgcgcgcgacgggauccgggacgccauggugggccugcgcgaggagaugaucgagaagauccggaccgaggcccugaugaccaacgaccgccucgaggccauggcgcggcugcgcaacgaggaguccgagaagauggccaaggacaccagcgacgaggugucccugaaccccacgagcgagaagcucaacaaccugcuggagggcaacgacagcgacaacgaccucucccuggaggacuucugaggacuagugcaucacauuuaaaagcaucucagccuaccaugagaauaagagaaagaaaaugaagaucaauagcuuauucaucucuuuuucuuuuucguugguguaaagccaacacccugucuaaaaaacauaaauuucuuuaaucauuuugccucuuuucucugugcuucaauuaauaaaaaauggaaagaaccuagaucuaaaaaaaaaaaaaaaaaaaaaaaaaaaaaaaaaaaaaaaaaaaaaaaaaaaaaaaaaaaaaaaaugcaucccccccccccccccccccccccccccccccaaaggcucuuuucagagccaccagaauu

SEQ ID NO: 20937 - RNA, 1108 nt, Artificial Sequence
  mRNA product Design i-2 comprising derived and/or modified sequence from HRSV(Memphis-37)__AIY60637.1__P (opt2)
ggggcgcugccuacggagguggcagccaucuccuucucggcaucaagcuuaccauggagaaguucgcccccgaguuccacggcgaggacgccaacaaccgcgccaccaaguuccucgaguccaucaagggcaaguucaccucccccaaggaccccaagaagaaggacuccaucaucuccgucaacuccaucgacaucgaggucaccaaggagucccccaucaccuccaacuccaccaucaucaaccccaccaacgagaccgacgacaccgccggcaacaagcccaacuaccagcgcaagccccucgucuccuucaaggaggaccccacccccuccgacaaccccuucuccaagcucuacaaggagaccaucgagaccuucgacaacaacgaggaggaguccuccuacuccuacgaggagaucaacgaccagaccaacgacaacaucaccgcccgccucgaccgcaucgacgagaagcucuccgagauccucggcaugcuccacacccucgucgucgccuccgccggccccaccuccgcccgcgacggcauccgcgacgccauggucggccuccgcgaggagaugaucgagaagauccgcaccgaggcccucaugaccaacgaccgccucgaggccauggcccgccuccgcaacgaggaguccgagaagauggccaaggacaccuccgacgaggucucccucaaccccaccuccgagaagcucaacaaccuccucgagggcaacgacuccgacaacgaccucucccucgaggacuucugaggacuagugcaucacauuuaaaagcaucucagccuaccaugagaauaagagaaagaaaaugaagaucaauagcuuauucaucucuuuuucuuuuucguugguguaaagccaacacccugucuaaaaaacauaaauuucuuuaaucauuuugccucuuuucucugugcuucaauuaauaaaaaauggaaagaaccuagaucuaaaaaaaaaaaaaaaaaaaaaaaaaaaaaaaaaaaaaaaaaaaaaaaaaaaaaaaaaaaaaaaaugcaucccccccccccccccccccccccccccccccaaaggcucuuuucagagccaccagaauu

SEQ ID NO: 20938 - RNA, 1108 nt, Artificial Sequence
  mRNA product Design i-2 comprising derived and/or modified sequence from HRSV(Memphis-37)__AIY60637.1__P (opt3)
ggggcgcugccuacggagguggcagccaucuccuucucggcaucaagcuuaccauggagaaguucgcccccgaauuucacggcgaggacgcuaacaauagagcaaccaaauuccuggaaagcaucaaggggaaauuuacauccccuaaggauccgaaaaagaaggacucuauuauaucagugaacaguaucgauauugaggucacuaaagaaagcccaaucacguccaauucuaccauuaucaaccccacaaaugagacugacgauaccgccggaaacaagccuaauuaccagaggaaaccacucguuucguucaaggaggaccccacaccuucagauaacccauuuagcaaacuuuauaaggaaaccauagagacuuucgacaauaacgaagaggagaguuccuacucuuaugaagagaucaaugaucaaacaaacgacaauauuaccgcgcggcuggaucgcaucgacgaaaaguugagcgagauuuuagguaugcugcauacgcuagugguagcuuccgccggccccacuucagcacgagaugggauccgugacgccauggugggacucagagaagagaugauagagaaaauuaggaccgaagcucugaugacaaacgaccggcuugaggcaauggcccgccugagaaaugaagagagugaaaagauggcuaaagauacuagcgacgaggucucuuugaacccuaccuccgagaagcucaacaaucugcuggaaggcaacgauucagacaaugaucucagcuuagaggacuuuugaggacuagugcaucacauuuaaaagcaucucagccuaccaugagaauaagagaaagaaaaugaagaucaauagcuuauucaucucuuuuucuuuuucguugguguaaagccaacacccugucuaaaaaacauaaauuucuuuaaucauuuugccucuuuucucugugcuucaauuaauaaaaaauggaaagaaccuagaucuaaaaaaaaaaaaaaaaaaaaaaaaaaaaaaaaaaaaaaaaaaaaaaaaaaaaaaaaaaaaaaaaugcaucccccccccccccccccccccccccccccccaaaggcucuuuucagagccaccagaauu

SEQ ID NO: 20939 - RNA, 1108 nt, Artificial Sequence
  mRNA product Design i-2 comprising derived and/or modified sequence from HRSV(Memphis-37)__AIY60637.1__P (opt4)
ggggcgcugccuacggagguggcagccaucuccuucucggcaucaagcuuaccauggagaaguucgcccccgaguuccacggcgaggacgccaacaacagagccaccaaguuccuggagagcaucaagggcaaguucaccagccccaaggaccccaagaagaaggacagcaucaucagcgugaacagcaucgacaucgaggugaccaaggagagccccaucaccagcaacagcaccaucaucaaccccaccaacgagaccgacgacaccgccggcaacaagcccaacuaccagagaaagccccuggugagcuucaaggaggaccccacccccagcgacaaccccuucagcaagcuguacaaggagaccaucgagaccuucgacaacaacgaggaggagagcagcuacagcuacgaggagaucaacgaccagaccaacgacaacaucaccgccagacuggacagaaucgacgagaagcugagcgagauccugggcaugcugcacacccuggugguggccagcgccggccccaccagcgccagagacggcaucagagacgccauggugggccugagagaggagaugaucgagaagaucagaaccgaggcccugaugaccaacgacagacuggaggccauggccagacugagaaacgaggagagcgagaagauggccaaggacaccagcgacgaggugagccugaaccccaccagcgagaagcugaacaaccugcuggagggcaacgacagcgacaacgaccugagccuggaggacuucugaggacuagugcaucacauuuaaaagcaucucagccuaccaugagaauaagagaaagaaaaugaagaucaauagcuuauucaucucuuuuucuuuuucguugguguaaagccaacacccugucuaaaaaacauaaauuucuuuaaucauuuugccucuuuucucugugcuucaauuaauaaaaaauggaaagaaccuagaucuaaaaaaaaaaaaaaaaaaaaaaaaaaaaaaaaaaaaaaaaaaaaaaaaaaaaaaaaaaaaaaaaugcaucccccccccccccccccccccccccccccccaaaggcucuuuucagagccaccagaauu

SEQ ID NO: 20940 - RNA, 1108 nt, Artificial Sequence
  mRNA product Design i-2 comprising derived and/or modified sequence from HRSV(Memphis-37)__AIY60637.1__P (opt5)
ggggcgcugccuacggagguggcagccaucuccuucucggcaucaagcuuaccauggagaaguucgcccccgaauuucacggcgaggacgcuaacaauagagccaccaaauuccuggaaagcaucaaggggaaauuuacauccccuaaggauccgaaaaagaaggacucuauuaucagcgugaacuccauugauaucgaggucacgaaagaaucucccauuaccagcaauuccacaaucaucaacccuaccaaugagacagacgauaccgcgggaaacaagcccaauuaccagcggaaaccucucguuucuuucaaggaggaccccacaccuagcgauaacccguuuuccaaacuguauaaggaaaccauugagacguucgacaauaacgaagaggagagcucuuacuccuaugaagagaucaaugaucaaaccaacgacaauauuacagcucgccuugauagaaucgacgaaaagcugagcgagauucucggcaugcugcauacccuugugguggccucugccgggcccacauccgcucgggauggaauccgcgacgccauggucggccugagagaagagaugauugagaaaauccggaccgaagcucucaugacgaacgaccgccuggaggccauggcgagacugcggaaugaagagagcgaaaagauggccaaagauacaucugacgaggugucccucaacccuaccagcgagaagcugaacaaucuucuggaagggaacgauuccgacaaugaucucucucuggaggacuuuugaggacuagugcaucacauuuaaaagcaucucagccuaccaugagaauaagagaaagaaaaugaagaucaauagcuuauucaucucuuuuucuuuuucguugguguaaagccaacacccugucuaaaaaacauaaauuucuuuaaucauuuugccucuuuucucugugcuucaauuaauaaaaaauggaaagaaccuagaucuaaaaaaaaaaaaaaaaaaaaaaaaaaaaaaaaaaaaaaaaaaaaaaaaaaaaaaaaaaaaaaaaugcaucccccccccccccccccccccccccccccccaaaggcucuuuucagagccaccagaauu

SEQ ID NO: 20941 - RNA, 1108 nt, Artificial Sequence
  mRNA product Design i-2 comprising derived and/or modified sequence from HRSV(Memphis-37)__AIY60637.1__P (opt6)
ggggcgcugccuacggagguggcagccaucuccuucucggcaucaagcuuaccauggaaaaauucgcaccagaauuccacggagaagacgcaaacaacagagcaacaaaauuccuagaaucaauaaaaggaaaauucacaagcccaaaagaucccaaaaaaaaagacucaaucauaagcguaaacucaauagauauagaaguaacaaaagaaaguccaauaacaagcaacaguacaauaauaaacccaacaaaugaaacagacgauacagcaggcaacaaaccaaacuaccaaagaaaaccgcuaguaaguuucaaagaagacccaacaccaagcgauaacccauuuucaaaauuauacaaagaaacaauagaaacauucgacaacaacgaagaagaaagcucauacucauacgaagaaauaaacgaccaaacaaacgacaacauaacagcgagauuagacagaauagacgaaaaacuaucagaaauacuaggcauguuacacacauuaguaguagcaagcgcaggaccaacaucagcaagagacggaauccgagacgcaaugguaggacuaagagaagaaaugauagaaaaaauaagaacagaagcacuaaugacaaacgacagacuagaagccauggcaagacuaagaaacgaagaaucagaaaaaauggcaaaagacacaucagacgaaguaucacuaaacccaacaagcgaaaaacuaaacaaccuauuagaaggaaacgacagcgacaacgaccuaucacucgaagacuucuaaggacuagugcaucacauuuaaaagcaucucagccuaccaugagaauaagagaaagaaaaugaagaucaauagcuuauucaucucuuuuucuuuuucguugguguaaagccaacacccugucuaaaaaacauaaauuucuuuaaucauuuugccucuuuucucugugcuucaauuaauaaaaaauggaaagaaccuagaucuaaaaaaaaaaaaaaaaaaaaaaaaaaaaaaaaaaaaaaaaaaaaaaaaaaaaaaaaaaaaaaaaugcaucccccccccccccccccccccccccccccccaaaggcucuuuucagagccaccagaauu

SEQ ID NO: 20942 - RNA, 1108 nt, Artificial Sequence
  mRNA product Design i-2 comprising derived and/or modified sequence from HRSV(Memphis-37)__AIY60637.1__P (opt11)
ggggcgcugccuacggagguggcagccaucuccuucucggcaucaagcuuaccauggaaaaauucgccccagaauuucacggcgaagacgccaacaaccgagccaccaaauuccucgaaucaauaaaaggcaaauucacaucccccaaagaccccaaaaaaaaagacucgaucaucuccgugaacucaaucgacauagaagucaccaaagaaagccccaucaccuccaacagcaccaucaucaaccccacaaacgaaacagacgacaccgccggcaacaaaccaaacuaccaacgaaaaccccucgucagcuucaaagaagaccccacaccaagcgacaaccccuucuccaaacucuacaaagaaacaauagaaaccuucgacaacaacgaagaagaaagcucguacucauacgaagaaaucaacgaccaaaccaacgacaacaucaccgcccgccucgaccgcaucgacgaaaaacucuccgaaauccucggaaugcuccacacacucgucgucgccagcgccggccccaccucagcccgggacggcauccgcgacgccauggugggccuccgcgaggaaaugaucgaaaaaauccgcacagaagcccucaugaccaacgaccgccucgaagccauggcccgccuccgcaacgaagaauccgaaaaaauggccaaagacaccuccgacgaagucucacuaaaccccaccuccgaaaaacuaaacaaccuccuagaaggcaacgacagcgacaacgaccucucccuagaagacuucuaaggacuagugcaucacauuuaaaagcaucucagccuaccaugagaauaagagaaagaaaaugaagaucaauagcuuauucaucucuuuuucuuuuucguugguguaaagccaacacccugucuaaaaaacauaaauuucuuuaaucauuuugccucuuuucucugugcuucaauuaauaaaaaauggaaagaaccuagaucuaaaaaaaaaaaaaaaaaaaaaaaaaaaaaaaaaaaaaaaaaaaaaaaaaaaaaaaaaaaaaaaaugcaucccccccccccccccccccccccccccccccaaaggcucuuuucagagccaccagaauu

SEQ ID NO: 20943 - RNA, 943 nt, Artificial Sequence
  mRNA product Design i-3 comprising derived and/or modified sequence from HRSV(Memphis-37)__AIY60637.1__P (wt)
gggagaaagcuuaccauggaaaaguuugcuccugaauuccauggagaagacgcaaacaacagagccacuaaauuccuagaaucaauaaagggcaaauucacaucaccuaaagaucccaagaaaaaagauaguaucauaucugucaacucaauagauauagaaguaaccaaagaaagcccuauaacuucaaauucaaccauuauaaacccuacaaaugagacagaugauacugcagggaacaagcccaauuaucaaagaaaaccacuagugaguuucaaagaagacccuacgccaagugauaaucccuuuucaaaacuauacaaagaaaccauagaaacauuugauaacaaugaagaagaaucuagcuauucauaugaagaaauaaaugaucagacaaacgauaauauaacagcaagauuagauaggauugaugaaaaauuaagugaaauacuaggaaugcuucacacacuaguaguagcaagugcaggaccuacaucugcucgggaugguauaagagaugccaugguugguuuaagagaagaaaugauagaaaaaaucagaacugaagcauugaugaccaaugauagauuagaagcuauggcaagacucaggaaugaggaaagugaaaagauggcaaaagacacaucagaugaagugucucucaauccaacaucagagaaauugaacaaccuguuggaaggaaaugauagugauaaugaucuaucacuugaagauuucugaggacuaguuauaagacugacuagcccgaugggccucccaacgggcccuccuccccuccuugcaccgagauuaauaaaaaaaaaaaaaaaaaaaaaaaaaaaaaaaaaaaaaaaaaaaaaaaaaaaaaaaaaaaaaaaaugcaucccccccccccccccccccccccccccccccaaaggcucuuuucagagccaccagaauu

SEQ ID NO: 20944 - RNA, 943 nt, Artificial Sequence
  mRNA product Design i-3 comprising derived and/or modified sequence from HRSV(Memphis-37)__AIY60637.1__P (opt1)
gggagaaagcuuaccauggagaaguucgcccccgaguuccacggcgaggacgccaacaaccgcgcgaccaaguuccuggagagcaucaaggggaaguucaccuccccgaaggaccccaagaagaaggacagcaucaucuccgugaacagcaucgacaucgaggucacgaaggagucccccaucaccagcaacuccaccaucaucaaccccaccaacgagacggacgacaccgccggcaacaagccgaacuaccagcggaagccccucgugagcuucaaggaggaccccacccccuccgacaacccguucagcaagcuguacaaggagaccaucgagacguucgacaacaacgaggaggaguccagcuacuccuacgaggagaucaacgaccagaccaacgacaacaucaccgcccgccuggaccggaucgacgagaagcucagcgagauccuggggaugcugcacacccucguggucgccuccgccggccccacgagcgcgcgcgacgggauccgggacgccauggugggccugcgcgaggagaugaucgagaagauccggaccgaggcccugaugaccaacgaccgccucgaggccauggcgcggcugcgcaacgaggaguccgagaagauggccaaggacaccagcgacgaggugucccugaaccccacgagcgagaagcucaacaaccugcuggagggcaacgacagcgacaacgaccucucccuggaggacuucugaggacuaguuauaagacugacuagcccgaugggccucccaacgggcccuccuccccuccuugcaccgagauuaauaaaaaaaaaaaaaaaaaaaaaaaaaaaaaaaaaaaaaaaaaaaaaaaaaaaaaaaaaaaaaaaaugcaucccccccccccccccccccccccccccccccaaaggcucuuuucagagccaccagaauu

SEQ ID NO: 20945 - RNA, 943 nt, Artificial Sequence
  mRNA product Design i-3 comprising derived and/or modified sequence from HRSV(Memphis-37)__AIY60637.1__P (opt2)
gggagaaagcuuaccauggagaaguucgcccccgaguuccacggcgaggacgccaacaaccgcgccaccaaguuccucgaguccaucaagggcaaguucaccucccccaaggaccccaagaagaaggacuccaucaucuccgucaacuccaucgacaucgaggucaccaaggagucccccaucaccuccaacuccaccaucaucaaccccaccaacgagaccgacgacaccgccggcaacaagcccaacuaccagcgcaagccccucgucuccuucaaggaggaccccacccccuccgacaaccccuucuccaagcucuacaaggagaccaucgagaccuucgacaacaacgaggaggaguccuccuacuccuacgaggagaucaacgaccagaccaacgacaacaucaccgcccgccucgaccgcaucgacgagaagcucuccgagauccucggcaugcuccacacccucgucgucgccuccgccggccccaccuccgcccgcgacggcauccgcgacgccauggucggccuccgcgaggagaugaucgagaagauccgcaccgaggcccucaugaccaacgaccgccucgaggccauggcccgccuccgcaacgaggaguccgagaagauggccaaggacaccuccgacgaggucucccucaaccccaccuccgagaagcucaacaaccuccucgagggcaacgacuccgacaacgaccucucccucgaggacuucugaggacuaguuauaagacugacuagcccgaugggccucccaacgggcccuccuccccuccuugcaccgagauuaauaaaaaaaaaaaaaaaaaaaaaaaaaaaaaaaaaaaaaaaaaaaaaaaaaaaaaaaaaaaaaaaaugcaucccccccccccccccccccccccccccccccaaaggcucuuuucagagccaccagaauu

SEQ ID NO: 20946 - RNA, 943 nt, Artificial Sequence
  mRNA product Design i-3 comprising derived and/or modified sequence from HRSV(Memphis-37)__AIY60637.1__P (opt3)
gggagaaagcuuaccauggagaaguucgcccccgaauuucacggcgaggacgcuaacaauagagcaaccaaauuccuggaaagcaucaaggggaaauuuacauccccuaaggauccgaaaaagaaggacucuauuauaucagugaacaguaucgauauugaggucacuaaagaaagcccaaucacguccaauucuaccauuaucaaccccacaaaugagacugacgauaccgccggaaacaagccuaauuaccagaggaaaccacucguuucguucaaggaggaccccacaccuucagauaacccauuuagcaaacuuuauaaggaaaccauagagacuuucgacaauaacgaagaggagaguuccuacucuuaugaagagaucaaugaucaaacaaacgacaauauuaccgcgcggcuggaucgcaucgacgaaaaguugagcgagauuuuagguaugcugcauacgcuagugguagcuuccgccggccccacuucagcacgagaugggauccgugacgccauggugggacucagagaagagaugauagagaaaauuaggaccgaagcucugaugacaaacgaccggcuugaggcaauggcccgccugagaaaugaagagagugaaaagauggcuaaagauacuagcgacgaggucucuuugaacccuaccuccgagaagcucaacaaucugcuggaaggcaacgauucagacaaugaucucagcuuagaggacuuuugaggacuaguuauaagacugacuagcccgaugggccucccaacgggcccuccuccccuccuugcaccgagauuaauaaaaaaaaaaaaaaaaaaaaaaaaaaaaaaaaaaaaaaaaaaaaaaaaaaaaaaaaaaaaaaaaugcaucccccccccccccccccccccccccccccccaaaggcucuuuucagagccaccagaauu

SEQ ID NO: 20947 - RNA, 943 nt, Artificial Sequence
  mRNA product Design i-3 comprising derived and/or modified sequence from HRSV(Memphis-37)__AIY60637.1__P (opt4)
gggagaaagcuuaccauggagaaguucgcccccgaguuccacggcgaggacgccaacaacagagccaccaaguuccuggagagcaucaagggcaaguucaccagccccaaggaccccaagaagaaggacagcaucaucagcgugaacagcaucgacaucgaggugaccaaggagagccccaucaccagcaacagcaccaucaucaaccccaccaacgagaccgacgacaccgccggcaacaagcccaacuaccagagaaagccccuggugagcuucaaggaggaccccacccccagcgacaaccccuucagcaagcuguacaaggagaccaucgagaccuucgacaacaacgaggaggagagcagcuacagcuacgaggagaucaacgaccagaccaacgacaacaucaccgccagacuggacagaaucgacgagaagcugagcgagauccugggcaugcugcacacccuggugguggccagcgccggccccaccagcgccagagacggcaucagagacgccauggugggccugagagaggagaugaucgagaagaucagaaccgaggcccugaugaccaacgacagacuggaggccauggccagacugagaaacgaggagagcgagaagauggccaaggacaccagcgacgaggugagccugaaccccaccagcgagaagcugaacaaccugcuggagggcaacgacagcgacaacgaccugagccuggaggacuucugaggacuaguuauaagacugacuagcccgaugggccucccaacgggcccuccuccccuccuugcaccgagauuaauaaaaaaaaaaaaaaaaaaaaaaaaaaaaaaaaaaaaaaaaaaaaaaaaaaaaaaaaaaaaaaaaugcaucccccccccccccccccccccccccccccccaaaggcucuuuucagagccaccagaauu

SEQ ID NO: 20948 - RNA, 943 nt, Artificial Sequence
  mRNA product Design i-3 comprising derived and/or modified sequence from HRSV(Memphis-37)__AIY60637.1__P (opt5)
gggagaaagcuuaccauggagaaguucgcccccgaauuucacggcgaggacgcuaacaauagagccaccaaauuccuggaaagcaucaaggggaaauuuacauccccuaaggauccgaaaaagaaggacucuauuaucagcgugaacuccauugauaucgaggucacgaaagaaucucccauuaccagcaauuccacaaucaucaacccuaccaaugagacagacgauaccgcgggaaacaagcccaauuaccagcggaaaccucucguuucuuucaaggaggaccccacaccuagcgauaacccguuuuccaaacuguauaaggaaaccauugagacguucgacaauaacgaagaggagagcucuuacuccuaugaagagaucaaugaucaaaccaacgacaauauuacagcucgccuugauagaaucgacgaaaagcugagcgagauucucggcaugcugcauacccuugugguggccucugccgggcccacauccgcucgggauggaauccgcgacgccauggucggccugagagaagagaugauugagaaaauccggaccgaagcucucaugacgaacgaccgccuggaggccauggcgagacugcggaaugaagagagcgaaaagauggccaaagauacaucugacgaggugucccucaacccuaccagcgagaagcugaacaaucuucuggaagggaacgauuccgacaaugaucucucucuggaggacuuuugaggacuaguuauaagacugacuagcccgaugggccucccaacgggcccuccuccccuccuugcaccgagauuaauaaaaaaaaaaaaaaaaaaaaaaaaaaaaaaaaaaaaaaaaaaaaaaaaaaaaaaaaaaaaaaaaugcaucccccccccccccccccccccccccccccccaaaggcucuuuucagagccaccagaauu

SEQ ID NO: 20949 - RNA, 943 nt, Artificial Sequence
  mRNA product Design i-3 comprising derived and/or modified sequence from HRSV(Memphis-37)__AIY60637.1__P (opt6)
gggagaaagcuuaccauggaaaaauucgcaccagaauuccacggagaagacgcaaacaacagagcaacaaaauuccuagaaucaauaaaaggaaaauucacaagcccaaaagaucccaaaaaaaaagacucaaucauaagcguaaacucaauagauauagaaguaacaaaagaaaguccaauaacaagcaacaguacaauaauaaacccaacaaaugaaacagacgauacagcaggcaacaaaccaaacuaccaaagaaaaccgcuaguaaguuucaaagaagacccaacaccaagcgauaacccauuuucaaaauuauacaaagaaacaauagaaacauucgacaacaacgaagaagaaagcucauacucauacgaagaaauaaacgaccaaacaaacgacaacauaacagcgagauuagacagaauagacgaaaaacuaucagaaauacuaggcauguuacacacauuaguaguagcaagcgcaggaccaacaucagcaagagacggaauccgagacgcaaugguaggacuaagagaagaaaugauagaaaaaauaagaacagaagcacuaaugacaaacgacagacuagaagccauggcaagacuaagaaacgaagaaucagaaaaaauggcaaaagacacaucagacgaaguaucacuaaacccaacaagcgaaaaacuaaacaaccuauuagaaggaaacgacagcgacaacgaccuaucacucgaagacuucuaaggacuaguuauaagacugacuagcccgaugggccucccaacgggcccuccuccccuccuugcaccgagauuaauaaaaaaaaaaaaaaaaaaaaaaaaaaaaaaaaaaaaaaaaaaaaaaaaaaaaaaaaaaaaaaaaugcaucccccccccccccccccccccccccccccccaaaggcucuuuucagagccaccagaauu

SEQ ID NO: 20950 - RNA, 943 nt, Artificial Sequence
  mRNA product Design i-3 comprising derived and/or modified sequence from HRSV(Memphis-37)__AIY60637.1__P (opt11)
gggagaaagcuuaccauggaaaaauucgccccagaauuucacggcgaagacgccaacaaccgagccaccaaauuccucgaaucaauaaaaggcaaauucacaucccccaaagaccccaaaaaaaaagacucgaucaucuccgugaacucaaucgacauagaagucaccaaagaaagccccaucaccuccaacagcaccaucaucaaccccacaaacgaaacagacgacaccgccggcaacaaaccaaacuaccaacgaaaaccccucgucagcuucaaagaagaccccacaccaagcgacaaccccuucuccaaacucuacaaagaaacaauagaaaccuucgacaacaacgaagaagaaagcucguacucauacgaagaaaucaacgaccaaaccaacgacaacaucaccgcccgccucgaccgcaucgacgaaaaacucuccgaaauccucggaaugcuccacacacucgucgucgccagcgccggccccaccucagcccgggacggcauccgcgacgccauggugggccuccgcgaggaaaugaucgaaaaaauccgcacagaagcccucaugaccaacgaccgccucgaagccauggcccgccuccgcaacgaagaauccgaaaaaauggccaaagacaccuccgacgaagucucacuaaaccccaccuccgaaaaacuaaacaaccuccuagaaggcaacgacagcgacaacgaccucucccuagaagacuucuaaggacuaguuauaagacugacuagcccgaugggccucccaacgggcccuccuccccuccuugcaccgagauuaauaaaaaaaaaaaaaaaaaaaaaaaaaaaaaaaaaaaaaaaaaaaaaaaaaaaaaaaaaaaaaaaaugcaucccccccccccccccccccccccccccccccaaaggcucuuuucagagccaccagaauu

SEQ ID NO: 20951 - protein, 194 aa, Artificial Sequence; identical to SEQ ID NO: 11552
  derived and/or modified protein sequence (wt) from HRSV(Memphis-37)__AIY60641.1__M2-1

SEQ ID NO: 20952 - RNA, 585 nt, Artificial Sequence
  derived and/or modified CDS sequence (wt) from HRSV(Memphis-37)__AIY60641.1__M2-1
augucacgaaggaauccuugcaaauuugaaauucgaggucauugcuugaaugguaagaggugucauuuuagucauaauuauuuugaauggccaccccaugcacugcuuguaagacaaaacuuuauguuaaacagaauacuuaagucuauggauaaaagcauagauacuuuaucagaaauaaguggagcugcagaguuggacagaacugaagaguaugcccucgguguaguuggagugcuagagaguuauauaggaucaauaaauaauauaacuaaacaaucagcauguguugccaugagcaaacuccucacugaacucaacagugaugacaucaaaaaacuaagagauaaugaagagccaaauucaccuaagauaagaguguacaauacugucauaucauauauugaaagcaacaggaaaaacaauaaacaaacuauccaucuguuaaaaagauugccagcagacguauugaagaaaaccaucaaaaacacauuggauauccacaagagcauaaccaucaacaacccaaaagaaucaacuguuaaugauacaaaugaccaugccaaaaauaaugauacuaccuga

SEQ ID NO: 20953 - RNA, 585 nt, Artificial Sequence
  derived and/or modified CDS sequence (opt1) from HRSV(Memphis-37)__AIY60641.1__M2-1
augagccgccggaaccccugcaaguucgagauccgcggccacugccugaacgggaagcggugccacuucucccacaacuacuucgaguggccgccccacgcccuccuggugcgccagaacuucaugcugaaccggauccucaagagcauggacaaguccaucgacacccugagcgagaucuccggcgccgcggagcuggaccgcaccgaggaguacgcccucggggucgugggcgugcuggagagcuacaucggguccaucaacaacaucacgaagcagagcgccugcgucgccauguccaagcugcucaccgagcugaacagcgacgacaucaagaagcugcgggacaacgaggagcccaacucccccaagauccgcguguacaacaccgugaucagcuacaucgaguccaaccggaagaacaacaagcagaccauccaccuccugaagcgccugccggccgacguccucaagaagacgaucaagaacacccuggacauccacaagagcaucaccaucaacaaccccaaggaguccaccgugaacgacacgaacgaccacgcgaagaacaacgacaccaccuga

SEQ ID NO: 20954 - RNA, 585 nt, Artificial Sequence
  derived and/or modified CDS sequence (opt2) from HRSV(Memphis-37)__AIY60641.1__M2-1
augucccgccgcaaccccugcaaguucgagauccgcggccacugccucaacggcaagcgcugccacuucucccacaacuacuucgaguggcccccccacgcccuccucguccgccagaacuucaugcucaaccgcauccucaaguccauggacaaguccaucgacacccucuccgagaucuccggcgccgccgagcucgaccgcaccgaggaguacgcccucggcgucgucggcguccucgaguccuacaucggcuccaucaacaacaucaccaagcaguccgccugcgucgccauguccaagcuccucaccgagcucaacuccgacgacaucaagaagcuccgcgacaacgaggagcccaacucccccaagauccgcgucuacaacaccgucaucuccuacaucgaguccaaccgcaagaacaacaagcagaccauccaccuccucaagcgccuccccgccgacguccucaagaagaccaucaagaacacccucgacauccacaaguccaucaccaucaacaaccccaaggaguccaccgucaacgacaccaacgaccacgccaagaacaacgacaccaccuga

SEQ ID NO: 20955 - RNA, 585 nt, Artificial Sequence
  derived and/or modified CDS sequence (opt3) from HRSV(Memphis-37)__AIY60641.1__M2-1
augagcagaaggaaccccugcaaguucgagauccggggccacugucugaaugggaaacgcugccauuuuucccacaacuacuucgaauggccuccacaugcacuccuugugcgacagaauuuuaugcugaaccguauuuugaagucuauggacaaaucaauagauaccuuaagugagaucagcggagcugcagaacuggacagaacagaggaauaugcccuaggugucguuggcgugcucgaguccuacauugggucuaucaauaacauuacuaagcaaucggcguguguagcuaugucaaaacugcuuacggagcugaauagcgaugacaucaagaaguugagggauaacgaggaaccgaauagucccaaaauacggguguauaacaccgucaucuccuacauugaaucuaaucgcaagaacaauaaacagacaauccaccuccugaagagacugccugccgacgugcucaaaaagacuauuaagaacaccuuagauauccauaaaagcauaacaauuaauaacccaaaggaguccaccguuaacgacacuaaugaucacgccaaaaacaaugacacaaccuga

SEQ ID NO: 20956 - RNA, 585 nt, Artificial Sequence
  derived and/or modified CDS sequence (opt4) from HRSV(Memphis-37)__AIY60641.1__M2-1
augagcagaagaaaccccugcaaguucgagaucagaggccacugccugaacggcaagagaugccacuucagccacaacuacuucgaguggcccccccacgcccugcuggugagacagaacuucaugcugaacagaauccugaagagcauggacaagagcaucgacacccugagcgagaucagcggcgccgccgagcuggacagaaccgaggaguacgcccugggcguggugggcgugcuggagagcuacaucggcagcaucaacaacaucaccaagcagagcgccugcguggccaugagcaagcugcugaccgagcugaacagcgacgacaucaagaagcugagagacaacgaggagcccaacagccccaagaucagaguguacaacaccgugaucagcuacaucgagagcaacagaaagaacaacaagcagaccauccaccugcugaagagacugcccgccgacgugcugaagaagaccaucaagaacacccuggacauccacaagagcaucaccaucaacaaccccaaggagagcaccgugaacgacaccaacgaccacgccaagaacaacgacaccaccuga

SEQ ID NO: 20957 - RNA, 585 nt, Artificial Sequence
  derived and/or modified CDS sequence (opt5) from HRSV(Memphis-37)__AIY60641.1__M2-1
augagcagacggaaccccugcaaguucgagauccgcggccacugucugaaugggaaaagaugccauuuuucccacaacuacuucgaauggccuccgcaugcccuccuggugcggcagaauuuuaugcuuaaccgcauucugaagucuauggacaaaagcaucgauacccucuccgagauuucuggagcugccgaacuggacagaacagaggaauaugcgcuuggcgucguuggggugcuggagagcuacaucggauccauuaauaacaucacgaagcaaucugcuuguguggccaugagcaaacuccugaccgagcucaauuccgaugacaucaagaagcugcgggauaacgaggaacccaauagcccuaaaauucgcgucuauaacacagugaucucuuacauugaauccaauagaaagaacaauaaacagaccauccaucugcuuaagcggcugcccgccgacguucucaaaaagacaauuaagaacacccuggauauccacaaaagcauuacaaucaauaacccuaaggagucuaccgugaacgacacgaaugaucacgcuaaaaacaaugacaccacauga

SEQ ID NO: 20958 - RNA, 585 nt, Artificial Sequence
  derived and/or modified CDS sequence (opt6) from HRSV(Memphis-37)__AIY60641.1__M2-1
auguccagacgaaacccaugcaaauucgaaauaagaggacacugccuaaacggaaaaagaugccacuucucacacaacuacuucgaauggccaccacacgcacuccucguaagacaaaacuucaugcuaaacagaauacuaaaaucaauggacaaaucaauagacacacucucagaaauaucaggagcagcagaacuagaccgaacagaagaauacgcacuaggaguaguaggaguacuagaauccuacauaggaucaauaaacaacauaacaaaacaaucagcaugcguagcaaugucaaaacuacuaacagaauuaaacucagacgacauaaaaaaacuaagagacaacgaagaaccaaacucaccaaaaauaagaguauacaacaccguaauaucauacauagaaucaaacagaaaaaacaacaaacaaacaauacaccuacuaaaaagacuaccagcagacguccuaaaaaaaacaauaaaaaacacacucgacauacacaaaucaauaaccauaaacaacccaaaagaaucaacaguaaacgacaccaacgaccacgcaaaaaacaaugacacaacauaa

SEQ ID NO: 20959 - RNA, 585 nt, Artificial Sequence
  derived and/or modified CDS sequence (opt11) from HRSV(Memphis-37)__AIY60641.1__M2-1
augucccgacgcaaccccugcaaauucgaaauccgaggccacugccucaacggcaaacgcugccacuucucccacaacuacuucgaauggcccccccacgcccuccucguacgccaaaacuucaugcucaaccgaauccucaagucaauggacaaauccaucgacacccucuccgaaaucuccggcgccgccgaacucgaccgcaccgaagaauacgcccucggcgucgucggcguccucgaauccuacaucggcuccaucaacaacaucaccaaacaauccgccugcgucgccauguccaaacuccucaccgaacucaacuccgacgacaucaaaaaacuccgcgacaacgaagaacccaacucccccaaaauccgcgucuacaacaccguuaucuccuacaucgaauccaaccgaaaaaacaacaaacaaaccauccaccuccucaaacgacuccccgccgacguccucaaaaaaaccaucaaaaauacccuagacauccacaaauccaucaccaucaacaaccccaaagaauccaccgucaacgacaccaacgaccacgccaaaaacaacgacaccaccuaa

SEQ ID NO: 20960 - RNA, 861 nt, Artificial Sequence
  mRNA product Design a-1 comprising derived and/or modified sequence from HRSV(Memphis-37)__AIY60641.1__M2-1 (wt)
gggagagucccgcagucggcguccagcggcucugcuuguucgugugugugucguugcaggccuuauucaagcuuaccaugucacgaaggaauccuugcaaauuugaaauucgaggucauugcuugaaugguaagaggugucauuuuagucauaauuauuuugaauggccaccccaugcacugcuuguaagacaaaacuuuauguuaaacagaauacuuaagucuauggauaaaagcauagauacuuuaucagaaauaaguggagcugcagaguuggacagaacugaagaguaugcccucgguguaguuggagugcuagagaguuauauaggaucaauaaauaauauaacuaaacaaucagcauguguugccaugagcaaacuccucacugaacucaacagugaugacaucaaaaaacuaagagauaaugaagagccaaauucaccuaagauaagaguguacaauacugucauaucauauauugaaagcaacaggaaaaacaauaaacaaacuauccaucuguuaaaaagauugccagcagacguauugaagaaaaccaucaaaaacacauuggauauccacaagagcauaaccaucaacaacccaaaagaaucaacuguuaaugauacaaaugaccaugccaaaaauaaugauacuaccugaggacuagucccuguucccagagcccacuuuuuuuucuuuuuuugaaauaaaauagccugucuuucagaucuaaaaaaaaaaaaaaaaaaaaaaaaaaaaaaaaaaaaaaaaaaaaaaaaaaaaaaaaaaaaaaaaugcaucccccccccccccccccccccccccccccccaaaggcucuuuucagagccaccagaauu

SEQ ID NO: 20961 - RNA, 861 nt, Artificial Sequence
  mRNA product Design a-1 comprising derived and/or modified sequence from HRSV(Memphis-37)__AIY60641.1__M2-1 (opt1)
gggagagucccgcagucggcguccagcggcucugcuuguucgugugugugucguugcaggccuuauucaagcuuaccaugagccgccggaaccccugcaaguucgagauccgcggccacugccugaacgggaagcggugccacuucucccacaacuacuucgaguggccgccccacgcccuccuggugcgccagaacuucaugcugaaccggauccucaagagcauggacaaguccaucgacacccugagcgagaucuccggcgccgcggagcuggaccgcaccgaggaguacgcccucggggucgugggcgugcuggagagcuacaucggguccaucaacaacaucacgaagcagagcgccugcgucgccauguccaagcugcucaccgagcugaacagcgacgacaucaagaagcugcgggacaacgaggagcccaacucccccaagauccgcguguacaacaccgugaucagcuacaucgaguccaaccggaagaacaacaagcagaccauccaccuccugaagcgccugccggccgacguccucaagaagacgaucaagaacacccuggacauccacaagagcaucaccaucaacaaccccaaggaguccaccgugaacgacacgaacgaccacgcgaagaacaacgacaccaccugaggacuagucccuguucccagagcccacuuuuuuuucuuuuuuugaaauaaaauagccugucuuucagaucuaaaaaaaaaaaaaaaaaaaaaaaaaaaaaaaaaaaaaaaaaaaaaaaaaaaaaaaaaaaaaaaaugcaucccccccccccccccccccccccccccccccaaaggcucuuuucagagccaccagaauu

SEQ ID NO: 20962 - RNA, 861 nt, Artificial Sequence
  mRNA product Design a-1 comprising derived and/or modified sequence from HRSV(Memphis-37)__AIY60641.1__M2-1 (opt2)
gggagagucccgcagucggcguccagcggcucugcuuguucgugugugugucguugcaggccuuauucaagcuuaccaugucccgccgcaaccccugcaaguucgagauccgcggccacugccucaacggcaagcgcugccacuucucccacaacuacuucgaguggcccccccacgcccuccucguccgccagaacuucaugcucaaccgcauccucaaguccauggacaaguccaucgacacccucuccgagaucuccggcgccgccgagcucgaccgcaccgaggaguacgcccucggcgucgucggcguccucgaguccuacaucggcuccaucaacaacaucaccaagcaguccgccugcgucgccauguccaagcuccucaccgagcucaacuccgacgacaucaagaagcuccgcgacaacgaggagcccaacucccccaagauccgcgucuacaacaccgucaucuccuacaucgaguccaaccgcaagaacaacaagcagaccauccaccuccucaagcgccuccccgccgacguccucaagaagaccaucaagaacacccucgacauccacaaguccaucaccaucaacaaccccaaggaguccaccgucaacgacaccaacgaccacgccaagaacaacgacaccaccugaggacuagucccuguucccagagcccacuuuuuuuucuuuuuuugaaauaaaauagccugucuuucagaucuaaaaaaaaaaaaaaaaaaaaaaaaaaaaaaaaaaaaaaaaaaaaaaaaaaaaaaaaaaaaaaaaugcaucccccccccccccccccccccccccccccccaaaggcucuuuucagagccaccagaauu

SEQ ID NO: 20963 - RNA, 861 nt, Artificial Sequence
  mRNA product Design a-1 comprising derived and/or modified sequence from HRSV(Memphis-37)__AIY60641.1__M2-1 (opt3)
gggagagucccgcagucggcguccagcggcucugcuuguucgugugugugucguugcaggccuuauucaagcuuaccaugagcagaaggaaccccugcaaguucgagauccggggccacugucugaaugggaaacgcugccauuuuucccacaacuacuucgaauggccuccacaugcacuccuugugcgacagaauuuuaugcugaaccguauuuugaagucuauggacaaaucaauagauaccuuaagugagaucagcggagcugcagaacuggacagaacagaggaauaugcccuaggugucguuggcgugcucgaguccuacauugggucuaucaauaacauuacuaagcaaucggcguguguagcuaugucaaaacugcuuacggagcugaauagcgaugacaucaagaaguugagggauaacgaggaaccgaauagucccaaaauacggguguauaacaccgucaucuccuacauugaaucuaaucgcaagaacaauaaacagacaauccaccuccugaagagacugccugccgacgugcucaaaaagacuauuaagaacaccuuagauauccauaaaagcauaacaauuaauaacccaaaggaguccaccguuaacgacacuaaugaucacgccaaaaacaaugacacaaccugaggacuagucccuguucccagagcccacuuuuuuuucuuuuuuugaaauaaaauagccugucuuucagaucuaaaaaaaaaaaaaaaaaaaaaaaaaaaaaaaaaaaaaaaaaaaaaaaaaaaaaaaaaaaaaaaaugcaucccccccccccccccccccccccccccccccaaaggcucuuuucagagccaccagaauu

SEQ ID NO: 20964 - RNA, 861 nt, Artificial Sequence
  mRNA product Design a-1 comprising derived and/or modified sequence from HRSV(Memphis-37)__AIY60641.1__M2-1 (opt4)
gggagagucccgcagucggcguccagcggcucugcuuguucgugugugugucguugcaggccuuauucaagcuuaccaugagcagaagaaaccccugcaaguucgagaucagaggccacugccugaacggcaagagaugccacuucagccacaacuacuucgaguggcccccccacgcccugcuggugagacagaacuucaugcugaacagaauccugaagagcauggacaagagcaucgacacccugagcgagaucagcggcgccgccgagcuggacagaaccgaggaguacgcccugggcguggugggcgugcuggagagcuacaucggcagcaucaacaacaucaccaagcagagcgccugcguggccaugagcaagcugcugaccgagcugaacagcgacgacaucaagaagcugagagacaacgaggagcccaacagccccaagaucagaguguacaacaccgugaucagcuacaucgagagcaacagaaagaacaacaagcagaccauccaccugcugaagagacugcccgccgacgugcugaagaagaccaucaagaacacccuggacauccacaagagcaucaccaucaacaaccccaaggagagcaccgugaacgacaccaacgaccacgccaagaacaacgacaccaccugaggacuagucccuguucccagagcccacuuuuuuuucuuuuuuugaaauaaaauagccugucuuucagaucuaaaaaaaaaaaaaaaaaaaaaaaaaaaaaaaaaaaaaaaaaaaaaaaaaaaaaaaaaaaaaaaaugcaucccccccccccccccccccccccccccccccaaaggcucuuuucagagccaccagaauu

SEQ ID NO: 20965 - RNA, 861 nt, Artificial Sequence
  mRNA product Design a-1 comprising derived and/or modified sequence from HRSV(Memphis-37)__AIY60641.1__M2-1 (opt5)
gggagagucccgcagucggcguccagcggcucugcuuguucgugugugugucguugcaggccuuauucaagcuuaccaugagcagacggaaccccugcaaguucgagauccgcggccacugucugaaugggaaaagaugccauuuuucccacaacuacuucgaauggccuccgcaugcccuccuggugcggcagaauuuuaugcuuaaccgcauucugaagucuauggacaaaagcaucgauacccucuccgagauuucuggagcugccgaacuggacagaacagaggaauaugcgcuuggcgucguuggggugcuggagagcuacaucggauccauuaauaacaucacgaagcaaucugcuuguguggccaugagcaaacuccugaccgagcucaauuccgaugacaucaagaagcugcgggauaacgaggaacccaauagcccuaaaauucgcgucuauaacacagugaucucuuacauugaauccaauagaaagaacaauaaacagaccauccaucugcuuaagcggcugcccgccgacguucucaaaaagacaauuaagaacacccuggauauccacaaaagcauuacaaucaauaacccuaaggagucuaccgugaacgacacgaaugaucacgcuaaaaacaaugacaccacaugaggacuagucccuguucccagagcccacuuuuuuuucuuuuuuugaaauaaaauagccugucuuucagaucuaaaaaaaaaaaaaaaaaaaaaaaaaaaaaaaaaaaaaaaaaaaaaaaaaaaaaaaaaaaaaaaaugcaucccccccccccccccccccccccccccccccaaaggcucuuuucagagccaccagaauu

SEQ ID NO: 20966 - RNA, 861 nt, Artificial Sequence
  mRNA product Design a-1 comprising derived and/or modified sequence from HRSV(Memphis-37)__AIY60641.1__M2-1 (opt6)
gggagagucccgcagucggcguccagcggcucugcuuguucgugugugugucguugcaggccuuauucaagcuuaccauguccagacgaaacccaugcaaauucgaaauaagaggacacugccuaaacggaaaaagaugccacuucucacacaacuacuucgaauggccaccacacgcacuccucguaagacaaaacuucaugcuaaacagaauacuaaaaucaauggacaaaucaauagacacacucucagaaauaucaggagcagcagaacuagaccgaacagaagaauacgcacuaggaguaguaggaguacuagaauccuacauaggaucaauaaacaacauaacaaaacaaucagcaugcguagcaaugucaaaacuacuaacagaauuaaacucagacgacauaaaaaaacuaagagacaacgaagaaccaaacucaccaaaaauaagaguauacaacaccguaauaucauacauagaaucaaacagaaaaaacaacaaacaaacaauacaccuacuaaaaagacuaccagcagacguccuaaaaaaaacaauaaaaaacacacucgacauacacaaaucaauaaccauaaacaacccaaaagaaucaacaguaaacgacaccaacgaccacgcaaaaaacaaugacacaacauaaggacuagucccuguucccagagcccacuuuuuuuucuuuuuuugaaauaaaauagccugucuuucagaucuaaaaaaaaaaaaaaaaaaaaaaaaaaaaaaaaaaaaaaaaaaaaaaaaaaaaaaaaaaaaaaaaugcaucccccccccccccccccccccccccccccccaaaggcucuuuucagagccaccagaauu

SEQ ID NO: 20967 - RNA, 861 nt, Artificial Sequence
  mRNA product Design a-1 comprising derived and/or modified sequence from HRSV(Memphis-37)__AIY60641.1__M2-1 (opt11)
gggagagucccgcagucggcguccagcggcucugcuuguucgugugugugucguugcaggccuuauucaagcuuaccaugucccgacgcaaccccugcaaauucgaaauccgaggccacugccucaacggcaaacgcugccacuucucccacaacuacuucgaauggcccccccacgcccuccucguacgccaaaacuucaugcucaaccgaauccucaagucaauggacaaauccaucgacacccucuccgaaaucuccggcgccgccgaacucgaccgcaccgaagaauacgcccucggcgucgucggcguccucgaauccuacaucggcuccaucaacaacaucaccaaacaauccgccugcgucgccauguccaaacuccucaccgaacucaacuccgacgacaucaaaaaacuccgcgacaacgaagaacccaacucccccaaaauccgcgucuacaacaccguuaucuccuacaucgaauccaaccgaaaaaacaacaaacaaaccauccaccuccucaaacgacuccccgccgacguccucaaaaaaaccaucaaaaauacccuagacauccacaaauccaucaccaucaacaaccccaaagaauccaccgucaacgacaccaacgaccacgccaaaaacaacgacaccaccuaaggacuagucccuguucccagagcccacuuuuuuuucuuuuuuugaaauaaaauagccugucuuucagaucuaaaaaaaaaaaaaaaaaaaaaaaaaaaaaaaaaaaaaaaaaaaaaaaaaaaaaaaaaaaaaaaaugcaucccccccccccccccccccccccccccccccaaaggcucuuuucagagccaccagaauu

SEQ ID NO: 20968 - RNA, 880 nt, Artificial Sequence
  mRNA product Design a-2 comprising derived and/or modified sequence from HRSV(Memphis-37)__AIY60641.1__M2-1 (wt)
gggagaguccgcucagccagguugcagaagcggcuuagcguguguccuaaucuucucucugcguguagguaggccugugccgcaaacaagcuuaccaugucacgaaggaauccuugcaaauuugaaauucgaggucauugcuugaaugguaagaggugucauuuuagucauaauuauuuugaauggccaccccaugcacugcuuguaagacaaaacuuuauguuaaacagaauacuuaagucuauggauaaaagcauagauacuuuaucagaaauaaguggagcugcagaguuggacagaacugaagaguaugcccucgguguaguuggagugcuagagaguuauauaggaucaauaaauaauauaacuaaacaaucagcauguguugccaugagcaaacuccucacugaacucaacagugaugacaucaaaaaacuaagagauaaugaagagccaaauucaccuaagauaagaguguacaauacugucauaucauauauugaaagcaacaggaaaaacaauaaacaaacuauccaucuguuaaaaagauugccagcagacguauugaagaaaaccaucaaaaacacauuggauauccacaagagcauaaccaucaacaacccaaaagaaucaacuguuaaugauacaaaugaccaugccaaaaauaaugauacuaccugaggacuagucccuguucccagagcccacuuuuuuuucuuuuuuugaaauaaaauagccugucuuucagaucuaaaaaaaaaaaaaaaaaaaaaaaaaaaaaaaaaaaaaaaaaaaaaaaaaaaaaaaaaaaaaaaaugcaucccccccccccccccccccccccccccccccaaaggcucuuuucagagccaccagaauu

SEQ ID NO: 20969 - RNA, 880 nt, Artificial Sequence
  mRNA product Design a-2 comprising derived and/or modified sequence from HRSV(Memphis-37)__AIY60641.1__M2-1 (opt1)
gggagaguccgcucagccagguugcagaagcggcuuagcguguguccuaaucuucucucugcguguagguaggccugugccgcaaacaagcuuaccaugagccgccggaaccccugcaaguucgagauccgcggccacugccugaacgggaagcggugccacuucucccacaacuacuucgaguggccgccccacgcccuccuggugcgccagaacuucaugcugaaccggauccucaagagcauggacaaguccaucgacacccugagcgagaucuccggcgccgcggagcuggaccgcaccgaggaguacgcccucggggucgugggcgugcuggagagcuacaucggguccaucaacaacaucacgaagcagagcgccugcgucgccauguccaagcugcucaccgagcugaacagcgacgacaucaagaagcugcgggacaacgaggagcccaacucccccaagauccgcguguacaacaccgugaucagcuacaucgaguccaaccggaagaacaacaagcagaccauccaccuccugaagcgccugccggccgacguccucaagaagacgaucaagaacacccuggacauccacaagagcaucaccaucaacaaccccaaggaguccaccgugaacgacacgaacgaccacgcgaagaacaacgacaccaccugaggacuagucccuguucccagagcccacuuuuuuuucuuuuuuugaaauaaaauagccugucuuucagaucuaaaaaaaaaaaaaaaaaaaaaaaaaaaaaaaaaaaaaaaaaaaaaaaaaaaaaaaaaaaaaaaaugcaucccccccccccccccccccccccccccccccaaaggcucuuuucagagccaccagaauu

SEQ ID NO: 20970 - RNA, 880 nt, Artificial Sequence
  mRNA product Design a-2 comprising derived and/or modified sequence from HRSV(Memphis-37)__AIY60641.1__M2-1 (opt2)
gggagaguccgcucagccagguugcagaagcggcuuagcguguguccuaaucuucucucugcguguagguaggccugugccgcaaacaagcuuaccaugucccgccgcaaccccugcaaguucgagauccgcggccacugccucaacggcaagcgcugccacuucucccacaacuacuucgaguggcccccccacgcccuccucguccgccagaacuucaugcucaaccgcauccucaaguccauggacaaguccaucgacacccucuccgagaucuccggcgccgccgagcucgaccgcaccgaggaguacgcccucggcgucgucggcguccucgaguccuacaucggcuccaucaacaacaucaccaagcaguccgccugcgucgccauguccaagcuccucaccgagcucaacuccgacgacaucaagaagcuccgcgacaacgaggagcccaacucccccaagauccgcgucuacaacaccgucaucuccuacaucgaguccaaccgcaagaacaacaagcagaccauccaccuccucaagcgccuccccgccgacguccucaagaagaccaucaagaacacccucgacauccacaaguccaucaccaucaacaaccccaaggaguccaccgucaacgacaccaacgaccacgccaagaacaacgacaccaccugaggacuagucccuguucccagagcccacuuuuuuuucuuuuuuugaaauaaaauagccugucuuucagaucuaaaaaaaaaaaaaaaaaaaaaaaaaaaaaaaaaaaaaaaaaaaaaaaaaaaaaaaaaaaaaaaaugcaucccccccccccccccccccccccccccccccaaaggcucuuuucagagccaccagaauu

SEQ ID NO: 20971 - RNA, 880 nt, Artificial Sequence
  mRNA product Design a-2 comprising derived and/or modified sequence from HRSV(Memphis-37)__AIY60641.1__M2-1 (opt3)
gggagaguccgcucagccagguugcagaagcggcuuagcguguguccuaaucuucucucugcguguagguaggccugugccgcaaacaagcuuaccaugagcagaaggaaccccugcaaguucgagauccggggccacugucugaaugggaaacgcugccauuuuucccacaacuacuucgaauggccuccacaugcacuccuugugcgacagaauuuuaugcugaaccguauuuugaagucuauggacaaaucaauagauaccuuaagugagaucagcggagcugcagaacuggacagaacagaggaauaugcccuaggugucguuggcgugcucgaguccuacauugggucuaucaauaacauuacuaagcaaucggcguguguagcuaugucaaaacugcuuacggagcugaauagcgaugacaucaagaaguugagggauaacgaggaaccgaauagucccaaaauacggguguauaacaccgucaucuccuacauugaaucuaaucgcaagaacaauaaacagacaauccaccuccugaagagacugccugccgacgugcucaaaaagacuauuaagaacaccuuagauauccauaaaagcauaacaauuaauaacccaaaggaguccaccguuaacgacacuaaugaucacgccaaaaacaaugacacaaccugaggacuagucccuguucccagagcccacuuuuuuuucuuuuuuugaaauaaaauagccugucuuucagaucuaaaaaaaaaaaaaaaaaaaaaaaaaaaaaaaaaaaaaaaaaaaaaaaaaaaaaaaaaaaaaaaaugcaucccccccccccccccccccccccccccccccaaaggcucuuuucagagccaccagaauu

SEQ ID NO: 20972 - RNA, 880 nt, Artificial Sequence
  mRNA product Design a-2 comprising derived and/or modified sequence from HRSV(Memphis-37)__AIY60641.1__M2-1 (opt4)
gggagaguccgcucagccagguugcagaagcggcuuagcguguguccuaaucuucucucugcguguagguaggccugugccgcaaacaagcuuaccaugagcagaagaaaccccugcaaguucgagaucagaggccacugccugaacggcaagagaugccacuucagccacaacuacuucgaguggcccccccacgcccugcuggugagacagaacuucaugcugaacagaauccugaagagcauggacaagagcaucgacacccugagcgagaucagcggcgccgccgagcuggacagaaccgaggaguacgcccugggcguggugggcgugcuggagagcuacaucggcagcaucaacaacaucaccaagcagagcgccugcguggccaugagcaagcugcugaccgagcugaacagcgacgacaucaagaagcugagagacaacgaggagcccaacagccccaagaucagaguguacaacaccgugaucagcuacaucgagagcaacagaaagaacaacaagcagaccauccaccugcugaagagacugcccgccgacgugcugaagaagaccaucaagaacacccuggacauccacaagagcaucaccaucaacaaccccaaggagagcaccgugaacgacaccaacgaccacgccaagaacaacgacaccaccugaggacuagucccuguucccagagcccacuuuuuuuucuuuuuuugaaauaaaauagccugucuuucagaucuaaaaaaaaaaaaaaaaaaaaaaaaaaaaaaaaaaaaaaaaaaaaaaaaaaaaaaaaaaaaaaaaugcaucccccccccccccccccccccccccccccccaaaggcucuuuucagagccaccagaauu

SEQ ID NO: 20973 - RNA, 880 nt, Artificial Sequence
  mRNA product Design a-2 comprising derived and/or modified sequence from HRSV(Memphis-37)__AIY60641.1__M2-1 (opt5)
gggagaguccgcucagccagguugcagaagcggcuuagcguguguccuaaucuucucucugcguguagguaggccugugccgcaaacaagcuuaccaugagcagacggaaccccugcaaguucgagauccgcggccacugucugaaugggaaaagaugccauuuuucccacaacuacuucgaauggccuccgcaugcccuccuggugcggcagaauuuuaugcuuaaccgcauucugaagucuauggacaaaagcaucgauacccucuccgagauuucuggagcugccgaacuggacagaacagaggaauaugcgcuuggcgucguuggggugcuggagagcuacaucggauccauuaauaacaucacgaagcaaucugcuuguguggccaugagcaaacuccugaccgagcucaauuccgaugacaucaagaagcugcgggauaacgaggaacccaauagcccuaaaauucgcgucuauaacacagugaucucuuacauugaauccaauagaaagaacaauaaacagaccauccaucugcuuaagcggcugcccgccgacguucucaaaaagacaauuaagaacacccuggauauccacaaaagcauuacaaucaauaacccuaaggagucuaccgugaacgacacgaaugaucacgcuaaaaacaaugacaccacaugaggacuagucccuguucccagagcccacuuuuuuuucuuuuuuugaaauaaaauagccugucuuucagaucuaaaaaaaaaaaaaaaaaaaaaaaaaaaaaaaaaaaaaaaaaaaaaaaaaaaaaaaaaaaaaaaaugcaucccccccccccccccccccccccccccccccaaaggcucuuuucagagccaccagaauu

SEQ ID NO: 20974 - RNA, 880 nt, Artificial Sequence
  mRNA product Design a-2 comprising derived and/or modified sequence from HRSV(Memphis-37)__AIY60641.1__M2-1 (opt6)
gggagaguccgcucagccagguugcagaagcggcuuagcguguguccuaaucuucucucugcguguagguaggccugugccgcaaacaagcuuaccauguccagacgaaacccaugcaaauucgaaauaagaggacacugccuaaacggaaaaagaugccacuucucacacaacuacuucgaauggccaccacacgcacuccucguaagacaaaacuucaugcuaaacagaauacuaaaaucaauggacaaaucaauagacacacucucagaaauaucaggagcagcagaacuagaccgaacagaagaauacgcacuaggaguaguaggaguacuagaauccuacauaggaucaauaaacaacauaacaaaacaaucagcaugcguagcaaugucaaaacuacuaacagaauuaaacucagacgacauaaaaaaacuaagagacaacgaagaaccaaacucaccaaaaauaagaguauacaacaccguaauaucauacauagaaucaaacagaaaaaacaacaaacaaacaauacaccuacuaaaaagacuaccagcagacguccuaaaaaaaacaauaaaaaacacacucgacauacacaaaucaauaaccauaaacaacccaaaagaaucaacaguaaacgacaccaacgaccacgcaaaaaacaaugacacaacauaaggacuagucccuguucccagagcccacuuuuuuuucuuuuuuugaaauaaaauagccugucuuucagaucuaaaaaaaaaaaaaaaaaaaaaaaaaaaaaaaaaaaaaaaaaaaaaaaaaaaaaaaaaaaaaaaaugcaucccccccccccccccccccccccccccccccaaaggcucuuuucagagccaccagaauu

SEQ ID NO: 20975 - RNA, 880 nt, Artificial Sequence
  mRNA product Design a-2 comprising derived and/or modified sequence from HRSV(Memphis-37)__AIY60641.1__M2-1 (opt11)
gggagaguccgcucagccagguugcagaagcggcuuagcguguguccuaaucuucucucugcguguagguaggccugugccgcaaacaagcuuaccaugucccgacgcaaccccugcaaauucgaaauccgaggccacugccucaacggcaaacgcugccacuucucccacaacuacuucgaauggcccccccacgcccuccucguacgccaaaacuucaugcucaaccgaauccucaagucaauggacaaauccaucgacacccucuccgaaaucuccggcgccgccgaacucgaccgcaccgaagaauacgcccucggcgucgucggcguccucgaauccuacaucggcuccaucaacaacaucaccaaacaauccgccugcgucgccauguccaaacuccucaccgaacucaacuccgacgacaucaaaaaacuccgcgacaacgaagaacccaacucccccaaaauccgcgucuacaacaccguuaucuccuacaucgaauccaaccgaaaaaacaacaaacaaaccauccaccuccucaaacgacuccccgccgacguccucaaaaaaaccaucaaaaauacccuagacauccacaaauccaucaccaucaacaaccccaaagaauccaccgucaacgacaccaacgaccacgccaaaaacaacgacaccaccuaaggacuagucccuguucccagagcccacuuuuuuuucuuuuuuugaaauaaaauagccugucuuucagaucuaaaaaaaaaaaaaaaaaaaaaaaaaaaaaaaaaaaaaaaaaaaaaaaaaaaaaaaaaaaaaaaaugcaucccccccccccccccccccccccccccccccaaaggcucuuuucagagccaccagaauu

SEQ ID NO: 20976 - RNA, 958 nt, Artificial Sequence
  mRNA product Design a-3 comprising derived and/or modified sequence from HRSV(Memphis-37)__AIY60641.1__M2-1 (wt)
gggagagggcgcuuggcuugcaaggacccugagcugcggcauugaagcacacccaacccaacucgacugaagucagccucacugaaccggaucugagaaucuucucucucugggcuugccagggcucuccgaaccuagcuagcauccucuucaauuccaacuagaaagcuuaccaugucacgaaggaauccuugcaaauuugaaauucgaggucauugcuugaaugguaagaggugucauuuuagucauaauuauuuugaauggccaccccaugcacugcuuguaagacaaaacuuuauguuaaacagaauacuuaagucuauggauaaaagcauagauacuuuaucagaaauaaguggagcugcagaguuggacagaacugaagaguaugcccucgguguaguuggagugcuagagaguuauauaggaucaauaaauaauauaacuaaacaaucagcauguguugccaugagcaaacuccucacugaacucaacagugaugacaucaaaaaacuaagagauaaugaagagccaaauucaccuaagauaagaguguacaauacugucauaucauauauugaaagcaacaggaaaaacaauaaacaaacuauccaucuguuaaaaagauugccagcagacguauugaagaaaaccaucaaaaacacauuggauauccacaagagcauaaccaucaacaacccaaaagaaucaacuguuaaugauacaaaugaccaugccaaaaauaaugauacuaccugaggacuagucccuguucccagagcccacuuuuuuuucuuuuuuugaaauaaaauagccugucuuucagaucuaaaaaaaaaaaaaaaaaaaaaaaaaaaaaaaaaaaaaaaaaaaaaaaaaaaaaaaaaaaaaaaaugcaucccccccccccccccccccccccccccccccaaaggcucuuuucagagccaccagaauu

SEQ ID NO: 20977 - RNA, 958 nt, Artificial Sequence
  mRNA product Design a-3 comprising derived and/or modified sequence from HRSV(Memphis-37)__AIY60641.1__M2-1 (opt1)
gggagagggcgcuuggcuugcaaggacccugagcugcggcauugaagcacacccaacccaacucgacugaagucagccucacugaaccggaucugagaaucuucucucucugggcuugccagggcucuccgaaccuagcuagcauccucuucaauuccaacuagaaagcuuaccaugagccgccggaaccccugcaaguucgagauccgcggccacugccugaacgggaagcggugccacuucucccacaacuacuucgaguggccgccccacgcccuccuggugcgccagaacuucaugcugaaccggauccucaagagcauggacaaguccaucgacacccugagcgagaucuccggcgccgcggagcuggaccgcaccgaggaguacgcccucggggucgugggcgugcuggagagcuacaucggguccaucaacaacaucacgaagcagagcgccugcgucgccauguccaagcugcucaccgagcugaacagcgacgacaucaagaagcugcgggacaacgaggagcccaacucccccaagauccgcguguacaacaccgugaucagcuacaucgaguccaaccggaagaacaacaagcagaccauccaccuccugaagcgccugccggccgacguccucaagaagacgaucaagaacacccuggacauccacaagagcaucaccaucaacaaccccaaggaguccaccgugaacgacacgaacgaccacgcgaagaacaacgacaccaccugaggacuagucccuguucccagagcccacuuuuuuuucuuuuuuugaaauaaaauagccugucuuucagaucuaaaaaaaaaaaaaaaaaaaaaaaaaaaaaaaaaaaaaaaaaaaaaaaaaaaaaaaaaaaaaaaaugcaucccccccccccccccccccccccccccccccaaaggcucuuuucagagccaccagaauu

SEQ ID NO: 20978 - RNA, 958 nt, Artificial Sequence
  mRNA product Design a-3 comprising derived and/or modified sequence from HRSV(Memphis-37)__AIY60641.1__M2-1 (opt2)
gggagagggcgcuuggcuugcaaggacccugagcugcggcauugaagcacacccaacccaacucgacugaagucagccucacugaaccggaucugagaaucuucucucucugggcuugccagggcucuccgaaccuagcuagcauccucuucaauuccaacuagaaagcuuaccaugucccgccgcaaccccugcaaguucgagauccgcggccacugccucaacggcaagcgcugccacuucucccacaacuacuucgaguggcccccccacgcccuccucguccgccagaacuucaugcucaaccgcauccucaaguccauggacaaguccaucgacacccucuccgagaucuccggcgccgccgagcucgaccgcaccgaggaguacgcccucggcgucgucggcguccucgaguccuacaucggcuccaucaacaacaucaccaagcaguccgccugcgucgccauguccaagcuccucaccgagcucaacuccgacgacaucaagaagcuccgcgacaacgaggagcccaacucccccaagauccgcgucuacaacaccgucaucuccuacaucgaguccaaccgcaagaacaacaagcagaccauccaccuccucaagcgccuccccgccgacguccucaagaagaccaucaagaacacccucgacauccacaaguccaucaccaucaacaaccccaaggaguccaccgucaacgacaccaacgaccacgccaagaacaacgacaccaccugaggacuagucccuguucccagagcccacuuuuuuuucuuuuuuugaaauaaaauagccugucuuucagaucuaaaaaaaaaaaaaaaaaaaaaaaaaaaaaaaaaaaaaaaaaaaaaaaaaaaaaaaaaaaaaaaaugcaucccccccccccccccccccccccccccccccaaaggcucuuuucagagccaccagaauu

SEQ ID NO: 20979 - RNA, 958 nt, Artificial Sequence
  mRNA product Design a-3 comprising derived and/or modified sequence from HRSV(Memphis-37)__AIY60641.1__M2-1 (opt3)
gggagagggcgcuuggcuugcaaggacccugagcugcggcauugaagcacacccaacccaacucgacugaagucagccucacugaaccggaucugagaaucuucucucucugggcuugccagggcucuccgaaccuagcuagcauccucuucaauuccaacuagaaagcuuaccaugagcagaaggaaccccugcaaguucgagauccggggccacugucugaaugggaaacgcugccauuuuucccacaacuacuucgaauggccuccacaugcacuccuugugcgacagaauuuuaugcugaaccguauuuugaagucuauggacaaaucaauagauaccuuaagugagaucagcggagcugcagaacuggacagaacagaggaauaugcccuaggugucguuggcgugcucgaguccuacauugggucuaucaauaacauuacuaagcaaucggcguguguagcuaugucaaaacugcuuacggagcugaauagcgaugacaucaagaaguugagggauaacgaggaaccgaauagucccaaaauacggguguauaacaccgucaucuccuacauugaaucuaaucgcaagaacaauaaacagacaauccaccuccugaagagacugccugccgacgugcucaaaaagacuauuaagaacaccuuagauauccauaaaagcauaacaauuaauaacccaaaggaguccaccguuaacgacacuaaugaucacgccaaaaacaaugacacaaccugaggacuagucccuguucccagagcccacuuuuuuuucuuuuuuugaaauaaaauagccugucuuucagaucuaaaaaaaaaaaaaaaaaaaaaaaaaaaaaaaaaaaaaaaaaaaaaaaaaaaaaaaaaaaaaaaaugcaucccccccccccccccccccccccccccccccaaaggcucuuuucagagccaccagaauu

SEQ ID NO: 20980 - RNA, 958 nt, Artificial Sequence
  mRNA product Design a-3 comprising derived and/or modified sequence from HRSV(Memphis-37)__AIY60641.1__M2-1 (opt4)
gggagagggcgcuuggcuugcaaggacccugagcugcggcauugaagcacacccaacccaacucgacugaagucagccucacugaaccggaucugagaaucuucucucucugggcuugccagggcucuccgaaccuagcuagcauccucuucaauuccaacuagaaagcuuaccaugagcagaagaaaccccugcaaguucgagaucagaggccacugccugaacggcaagagaugccacuucagccacaacuacuucgaguggcccccccacgcccugcuggugagacagaacuucaugcugaacagaauccugaagagcauggacaagagcaucgacacccugagcgagaucagcggcgccgccgagcuggacagaaccgaggaguacgcccugggcguggugggcgugcuggagagcuacaucggcagcaucaacaacaucaccaagcagagcgccugcguggccaugagcaagcugcugaccgagcugaacagcgacgacaucaagaagcugagagacaacgaggagcccaacagccccaagaucagaguguacaacaccgugaucagcuacaucgagagcaacagaaagaacaacaagcagaccauccaccugcugaagagacugcccgccgacgugcugaagaagaccaucaagaacacccuggacauccacaagagcaucaccaucaacaaccccaaggagagcaccgugaacgacaccaacgaccacgccaagaacaacgacaccaccugaggacuagucccuguucccagagcccacuuuuuuuucuuuuuuugaaauaaaauagccugucuuucagaucuaaaaaaaaaaaaaaaaaaaaaaaaaaaaaaaaaaaaaaaaaaaaaaaaaaaaaaaaaaaaaaaaugcaucccccccccccccccccccccccccccccccaaaggcucuuuucagagccaccagaauu

SEQ ID NO: 20981 - RNA, 958 nt, Artificial Sequence
  mRNA product Design a-3 comprising derived and/or modified sequence from HRSV(Memphis-37)__AIY60641.1__M2-1 (opt5)
gggagagggcgcuuggcuugcaaggacccugagcugcggcauugaagcacacccaacccaacucgacugaagucagccucacugaaccggaucugagaaucuucucucucugggcuugccagggcucuccgaaccuagcuagcauccucuucaauuccaacuagaaagcuuaccaugagcagacggaaccccugcaaguucgagauccgcggccacugucugaaugggaaaagaugccauuuuucccacaacuacuucgaauggccuccgcaugcccuccuggugcggcagaauuuuaugcuuaaccgcauucugaagucuauggacaaaagcaucgauacccucuccgagauuucuggagcugccgaacuggacagaacagaggaauaugcgcuuggcgucguuggggugcuggagagcuacaucggauccauuaauaacaucacgaagcaaucugcuuguguggccaugagcaaacuccugaccgagcucaauuccgaugacaucaagaagcugcgggauaacgaggaacccaauagcccuaaaauucgcgucuauaacacagugaucucuuacauugaauccaauagaaagaacaauaaacagaccauccaucugcuuaagcggcugcccgccgacguucucaaaaagacaauuaagaacacccuggauauccacaaaagcauuacaaucaauaacccuaaggagucuaccgugaacgacacgaaugaucacgcuaaaaacaaugacaccacaugaggacuagucccuguucccagagcccacuuuuuuuucuuuuuuugaaauaaaauagccugucuuucagaucuaaaaaaaaaaaaaaaaaaaaaaaaaaaaaaaaaaaaaaaaaaaaaaaaaaaaaaaaaaaaaaaaugcaucccccccccccccccccccccccccccccccaaaggcucuuuucagagccaccagaauu

SEQ ID NO: 20982 - RNA, 958 nt, Artificial Sequence
  mRNA product Design a-3 comprising derived and/or modified sequence from HRSV(Memphis-37)__AIY60641.1__M2-1 (opt6)
gggagagggcgcuuggcuugcaaggacccugagcugcggcauugaagcacacccaacccaacucgacugaagucagccucacugaaccggaucugagaaucuucucucucugggcuugccagggcucuccgaaccuagcuagcauccucuucaauuccaacuagaaagcuuaccauguccagacgaaacccaugcaaauucgaaauaagaggacacugccuaaacggaaaaagaugccacuucucacacaacuacuucgaauggccaccacacgcacuccucguaagacaaaacuucaugcuaaacagaauacuaaaaucaauggacaaaucaauagacacacucucagaaauaucaggagcagcagaacuagaccgaacagaagaauacgcacuaggaguaguaggaguacuagaauccuacauaggaucaauaaacaacauaacaaaacaaucagcaugcguagcaaugucaaaacuacuaacagaauuaaacucagacgacauaaaaaaacuaagagacaacgaagaaccaaacucaccaaaaauaagaguauacaacaccguaauaucauacauagaaucaaacagaaaaaacaacaaacaaacaauacaccuacuaaaaagacuaccagcagacguccuaaaaaaaacaauaaaaaacacacucgacauacacaaaucaauaaccauaaacaacccaaaagaaucaacaguaaacgacaccaacgaccacgcaaaaaacaaugacacaacauaaggacuagucccuguucccagagcccacuuuuuuuucuuuuuuugaaauaaaauagccugucuuucagaucuaaaaaaaaaaaaaaaaaaaaaaaaaaaaaaaaaaaaaaaaaaaaaaaaaaaaaaaaaaaaaaaaugcaucccccccccccccccccccccccccccccccaaaggcucuuuucagagccaccagaauu

SEQ ID NO: 20983 - RNA, 958 nt, Artificial Sequence
  mRNA product Design a-3 comprising derived and/or modified sequence from HRSV(Memphis-37)__AIY60641.1__M2-1 (opt11)
gggagagggcgcuuggcuugcaaggacccugagcugcggcauugaagcacacccaacccaacucgacugaagucagccucacugaaccggaucugagaaucuucucucucugggcuugccagggcucuccgaaccuagcuagcauccucuucaauuccaacuagaaagcuuaccaugucccgacgcaaccccugcaaauucgaaauccgaggccacugccucaacggcaaacgcugccacuucucccacaacuacuucgaauggcccccccacgcccuccucguacgccaaaacuucaugcucaaccgaauccucaagucaauggacaaauccaucgacacccucuccgaaaucuccggcgccgccgaacucgaccgcaccgaagaauacgcccucggcgucgucggcguccucgaauccuacaucggcuccaucaacaacaucaccaaacaauccgccugcgucgccauguccaaacuccucaccgaacucaacuccgacgacaucaaaaaacuccgcgacaacgaagaacccaacucccccaaaauccgcgucuacaacaccguuaucuccuacaucgaauccaaccgaaaaaacaacaaacaaaccauccaccuccucaaacgacuccccgccgacguccucaaaaaaaccaucaaaaauacccuagacauccacaaauccaucaccaucaacaaccccaaagaauccaccgucaacgacaccaacgaccacgccaaaaacaacgacaccaccuaaggacuagucccuguucccagagcccacuuuuuuuucuuuuuuugaaauaaaauagccugucuuucagaucuaaaaaaaaaaaaaaaaaaaaaaaaaaaaaaaaaaaaaaaaaaaaaaaaaaaaaaaaaaaaaaaaugcaucccccccccccccccccccccccccccccccaaaggcucuuuucagagccaccagaauu

SEQ ID NO: 20984 - RNA, 907 nt, Artificial Sequence
  mRNA product Design a-4 comprising derived and/or modified sequence from HRSV(Memphis-37)__AIY60641.1__M2-1 (wt)
gggagacuccugucgggcggaaguaggaggaguagaguuuaaaaacaguacucuuuuuccgguucgggacguaguugaagcaacgacaagccggauaaccgcucuugagacaggaagcuuaccaugucacgaaggaauccuugcaaauuugaaauucgaggucauugcuugaaugguaagaggugucauuuuagucauaauuauuuugaauggccaccccaugcacugcuuguaagacaaaacuuuauguuaaacagaauacuuaagucuauggauaaaagcauagauacuuuaucagaaauaaguggagcugcagaguuggacagaacugaagaguaugcccucgguguaguuggagugcuagagaguuauauaggaucaauaaauaauauaacuaaacaaucagcauguguugccaugagcaaacuccucacugaacucaacagugaugacaucaaaaaacuaagagauaaugaagagccaaauucaccuaagauaagaguguacaauacugucauaucauauauugaaagcaacaggaaaaacaauaaacaaacuauccaucuguuaaaaagauugccagcagacguauugaagaaaaccaucaaaaacacauuggauauccacaagagcauaaccaucaacaacccaaaagaaucaacuguuaaugauacaaaugaccaugccaaaaauaaugauacuaccugaggacuagucccuguucccagagcccacuuuuuuuucuuuuuuugaaauaaaauagccugucuuucagaucuaaaaaaaaaaaaaaaaaaaaaaaaaaaaaaaaaaaaaaaaaaaaaaaaaaaaaaaaaaaaaaaaugcaucccccccccccccccccccccccccccccccaaaggcucuuuucagagccaccagaauu

SEQ ID NO: 20985 - RNA, 907 nt, Artificial Sequence
  mRNA product Design a-4 comprising derived and/or modified sequence from HRSV(Memphis-37)__AIY60641.1__M2-1 (opt1)
gggagacuccugucgggcggaaguaggaggaguagaguuuaaaaacaguacucuuuuuccgguucgggacguaguugaagcaacgacaagccggauaaccgcucuugagacaggaagcuuaccaugagccgccggaaccccugcaaguucgagauccgcggccacugccugaacgggaagcggugccacuucucccacaacuacuucgaguggccgccccacgcccuccuggugcgccagaacuucaugcugaaccggauccucaagagcauggacaaguccaucgacacccugagcgagaucuccggcgccgcggagcuggaccgcaccgaggaguacgcccucggggucgugggcgugcuggagagcuacaucggguccaucaacaacaucacgaagcagagcgccugcgucgccauguccaagcugcucaccgagcugaacagcgacgacaucaagaagcugcgggacaacgaggagcccaacucccccaagauccgcguguacaacaccgugaucagcuacaucgaguccaaccggaagaacaacaagcagaccauccaccuccugaagcgccugccggccgacguccucaagaagacgaucaagaacacccuggacauccacaagagcaucaccaucaacaaccccaaggaguccaccgugaacgacacgaacgaccacgcgaagaacaacgacaccaccugaggacuagucccuguucccagagcccacuuuuuuuucuuuuuuugaaauaaaauagccugucuuucagaucuaaaaaaaaaaaaaaaaaaaaaaaaaaaaaaaaaaaaaaaaaaaaaaaaaaaaaaaaaaaaaaaaugcaucccccccccccccccccccccccccccccccaaaggcucuuuucagagccaccagaauu

SEQ ID NO: 20986 - RNA, 907 nt, Artificial Sequence
  mRNA product Design a-4 comprising derived and/or modified sequence from HRSV(Memphis-37)__AIY60641.1__M2-1 (opt2)
gggagacuccugucgggcggaaguaggaggaguagaguuuaaaaacaguacucuuuuuccgguucgggacguaguugaagcaacgacaagccggauaaccgcucuugagacaggaagcuuaccaugucccgccgcaaccccugcaaguucgagauccgcggccacugccucaacggcaagcgcugccacuucucccacaacuacuucgaguggcccccccacgcccuccucguccgccagaacuucaugcucaaccgcauccucaaguccauggacaaguccaucgacacccucuccgagaucuccggcgccgccgagcucgaccgcaccgaggaguacgcccucggcgucgucggcguccucgaguccuacaucggcuccaucaacaacaucaccaagcaguccgccugcgucgccauguccaagcuccucaccgagcucaacuccgacgacaucaagaagcuccgcgacaacgaggagcccaacucccccaagauccgcgucuacaacaccgucaucuccuacaucgaguccaaccgcaagaacaacaagcagaccauccaccuccucaagcgccuccccgccgacguccucaagaagaccaucaagaacacccucgacauccacaaguccaucaccaucaacaaccccaaggaguccaccgucaacgacaccaacgaccacgccaagaacaacgacaccaccugaggacuagucccuguucccagagcccacuuuuuuuucuuuuuuugaaauaaaauagccugucuuucagaucuaaaaaaaaaaaaaaaaaaaaaaaaaaaaaaaaaaaaaaaaaaaaaaaaaaaaaaaaaaaaaaaaugcaucccccccccccccccccccccccccccccccaaaggcucuuuucagagccaccagaauu

SEQ ID NO: 20987 - RNA, 907 nt, Artificial Sequence
  mRNA product Design a-4 comprising derived and/or modified sequence from HRSV(Memphis-37)__AIY60641.1__M2-1 (opt3)
gggagacuccugucgggcggaaguaggaggaguagaguuuaaaaacaguacucuuuuuccgguucgggacguaguugaagcaacgacaagccggauaaccgcucuugagacaggaagcuuaccaugagcagaaggaaccccugcaaguucgagauccggggccacugucugaaugggaaacgcugccauuuuucccacaacuacuucgaauggccuccacaugcacuccuugugcgacagaauuuuaugcugaaccguauuuugaagucuauggacaaaucaauagauaccuuaagugagaucagcggagcugcagaacuggacagaacagaggaauaugcccuaggugucguuggcgugcucgaguccuacauugggucuaucaauaacauuacuaagcaaucggcguguguagcuaugucaaaacugcuuacggagcugaauagcgaugacaucaagaaguugagggauaacgaggaaccgaauagucccaaaauacggguguauaacaccgucaucuccuacauugaaucuaaucgcaagaacaauaaacagacaauccaccuccugaagagacugccugccgacgugcucaaaaagacuauuaagaacaccuuagauauccauaaaagcauaacaauuaauaacccaaaggaguccaccguuaacgacacuaaugaucacgccaaaaacaaugacacaaccugaggacuagucccuguucccagagcccacuuuuuuuucuuuuuuugaaauaaaauagccugucuuucagaucuaaaaaaaaaaaaaaaaaaaaaaaaaaaaaaaaaaaaaaaaaaaaaaaaaaaaaaaaaaaaaaaaugcaucccccccccccccccccccccccccccccccaaaggcucuuuucagagccaccagaauu

SEQ ID NO: 20988 - RNA, 907 nt, Artificial Sequence
  mRNA product Design a-4 comprising derived and/or modified sequence from HRSV(Memphis-37)__AIY60641.1__M2-1 (opt4)
gggagacuccugucgggcggaaguaggaggaguagaguuuaaaaacaguacucuuuuuccgguucgggacguaguugaagcaacgacaagccggauaaccgcucuugagacaggaagcuuaccaugagcagaagaaaccccugcaaguucgagaucagaggccacugccugaacggcaagagaugccacuucagccacaacuacuucgaguggcccccccacgcccugcuggugagacagaacuucaugcugaacagaauccugaagagcauggacaagagcaucgacacccugagcgagaucagcggcgccgccgagcuggacagaaccgaggaguacgcccugggcguggugggcgugcuggagagcuacaucggcagcaucaacaacaucaccaagcagagcgccugcguggccaugagcaagcugcugaccgagcugaacagcgacgacaucaagaagcugagagacaacgaggagcccaacagccccaagaucagaguguacaacaccgugaucagcuacaucgagagcaacagaaagaacaacaagcagaccauccaccugcugaagagacugcccgccgacgugcugaagaagaccaucaagaacacccuggacauccacaagagcaucaccaucaacaaccccaaggagagcaccgugaacgacaccaacgaccacgccaagaacaacgacaccaccugaggacuagucccuguucccagagcccacuuuuuuuucuuuuuuugaaauaaaauagccugucuuucagaucuaaaaaaaaaaaaaaaaaaaaaaaaaaaaaaaaaaaaaaaaaaaaaaaaaaaaaaaaaaaaaaaaugcaucccccccccccccccccccccccccccccccaaaggcucuuuucagagccaccagaauu

SEQ ID NO: 20989 - RNA, 907 nt, Artificial Sequence
  mRNA product Design a-4 comprising derived and/or modified sequence from HRSV(Memphis-37)__AIY60641.1__M2-1 (opt5)
gggagacuccugucgggcggaaguaggaggaguagaguuuaaaaacaguacucuuuuuccgguucgggacguaguugaagcaacgacaagccggauaaccgcucuugagacaggaagcuuaccaugagcagacggaaccccugcaaguucgagauccgcggccacugucugaaugggaaaagaugccauuuuucccacaacuacuucgaauggccuccgcaugcccuccuggugcggcagaauuuuaugcuuaaccgcauucugaagucuauggacaaaagcaucgauacccucuccgagauuucuggagcugccgaacuggacagaacagaggaauaugcgcuuggcgucguuggggugcuggagagcuacaucggauccauuaauaacaucacgaagcaaucugcuuguguggccaugagcaaacuccugaccgagcucaauuccgaugacaucaagaagcugcgggauaacgaggaacccaauagcccuaaaauucgcgucuauaacacagugaucucuuacauugaauccaauagaaagaacaauaaacagaccauccaucugcuuaagcggcugcccgccgacguucucaaaaagacaauuaagaacacccuggauauccacaaaagcauuacaaucaauaacccuaaggagucuaccgugaacgacacgaaugaucacgcuaaaaacaaugacaccacaugaggacuagucccuguucccagagcccacuuuuuuuucuuuuuuugaaauaaaauagccugucuuucagaucuaaaaaaaaaaaaaaaaaaaaaaaaaaaaaaaaaaaaaaaaaaaaaaaaaaaaaaaaaaaaaaaaugcaucccccccccccccccccccccccccccccccaaaggcucuuuucagagccaccagaauu

SEQ ID NO: 20990 - RNA, 907 nt, Artificial Sequence
  mRNA product Design a-4 comprising derived and/or modified sequence from HRSV(Memphis-37)__AIY60641.1__M2-1 (opt6)
gggagacuccugucgggcggaaguaggaggaguagaguuuaaaaacaguacucuuuuuccgguucgggacguaguugaagcaacgacaagccggauaaccgcucuugagacaggaagcuuaccauguccagacgaaacccaugcaaauucgaaauaagaggacacugccuaaacggaaaaagaugccacuucucacacaacuacuucgaauggccaccacacgcacuccucguaagacaaaacuucaugcuaaacagaauacuaaaaucaauggacaaaucaauagacacacucucagaaauaucaggagcagcagaacuagaccgaacagaagaauacgcacuaggaguaguaggaguacuagaauccuacauaggaucaauaaacaacauaacaaaacaaucagcaugcguagcaaugucaaaacuacuaacagaauuaaacucagacgacauaaaaaaacuaagagacaacgaagaaccaaacucaccaaaaauaagaguauacaacaccguaauaucauacauagaaucaaacagaaaaaacaacaaacaaacaauacaccuacuaaaaagacuaccagcagacguccuaaaaaaaacaauaaaaaacacacucgacauacacaaaucaauaaccauaaacaacccaaaagaaucaacaguaaacgacaccaacgaccacgcaaaaaacaaugacacaacauaaggacuagucccuguucccagagcccacuuuuuuuucuuuuuuugaaauaaaauagccugucuuucagaucuaaaaaaaaaaaaaaaaaaaaaaaaaaaaaaaaaaaaaaaaaaaaaaaaaaaaaaaaaaaaaaaaugcaucccccccccccccccccccccccccccccccaaaggcucuuuucagagccaccagaauu

SEQ ID NO: 20991 - RNA, 907 nt, Artificial Sequence
  mRNA product Design a-4 comprising derived and/or modified sequence from HRSV(Memphis-37)__AIY60641.1__M2-1 (opt11)
gggagacuccugucgggcggaaguaggaggaguagaguuuaaaaacaguacucuuuuuccgguucgggacguaguugaagcaacgacaagccggauaaccgcucuugagacaggaagcuuaccaugucccgacgcaaccccugcaaauucgaaauccgaggccacugccucaacggcaaacgcugccacuucucccacaacuacuucgaauggcccccccacgcccuccucguacgccaaaacuucaugcucaaccgaauccucaagucaauggacaaauccaucgacacccucuccgaaaucuccggcgccgccgaacucgaccgcaccgaagaauacgcccucggcgucgucggcguccucgaauccuacaucggcuccaucaacaacaucaccaaacaauccgccugcgucgccauguccaaacuccucaccgaacucaacuccgacgacaucaaaaaacuccgcgacaacgaagaacccaacucccccaaaauccgcgucuacaacaccguuaucuccuacaucgaauccaaccgaaaaaacaacaaacaaaccauccaccuccucaaacgacuccccgccgacguccucaaaaaaaccaucaaaaauacccuagacauccacaaauccaucaccaucaacaaccccaaagaauccaccgucaacgacaccaacgaccacgccaaaaacaacgacaccaccuaaggacuagucccuguucccagagcccacuuuuuuuucuuuuuuugaaauaaaauagccugucuuucagaucuaaaaaaaaaaaaaaaaaaaaaaaaaaaaaaaaaaaaaaaaaaaaaaaaaaaaaaaaaaaaaaaaugcaucccccccccccccccccccccccccccccccaaaggcucuuuucagagccaccagaauu

SEQ ID NO: 20992 - RNA, 853 nt, Artificial Sequence
  mRNA product Design a-5 comprising derived and/or modified sequence from HRSV(Memphis-37)__AIY60641.1__M2-1 (wt)
gggagacuuucccauucuguagcagaauuugguguugccuguggucuuggucccgcggagaagcuuaccaugucacgaaggaauccuugcaaauuugaaauucgaggucauugcuugaaugguaagaggugucauuuuagucauaauuauuuugaauggccaccccaugcacugcuuguaagacaaaacuuuauguuaaacagaauacuuaagucuauggauaaaagcauagauacuuuaucagaaauaaguggagcugcagaguuggacagaacugaagaguaugcccucgguguaguuggagugcuagagaguuauauaggaucaauaaauaauauaacuaaacaaucagcauguguugccaugagcaaacuccucacugaacucaacagugaugacaucaaaaaacuaagagauaaugaagagccaaauucaccuaagauaagaguguacaauacugucauaucauauauugaaagcaacaggaaaaacaauaaacaaacuauccaucuguuaaaaagauugccagcagacguauugaagaaaaccaucaaaaacacauuggauauccacaagagcauaaccaucaacaacccaaaagaaucaacuguuaaugauacaaaugaccaugccaaaaauaaugauacuaccugaggacuagucccuguucccagagcccacuuuuuuuucuuuuuuugaaauaaaauagccugucuuucagaucuaaaaaaaaaaaaaaaaaaaaaaaaaaaaaaaaaaaaaaaaaaaaaaaaaaaaaaaaaaaaaaaaugcaucccccccccccccccccccccccccccccccaaaggcucuuuucagagccaccagaauu

SEQ ID NO: 20993 - RNA, 853 nt, Artificial Sequence
  mRNA product Design a-5 comprising derived and/or modified sequence from HRSV(Memphis-37)__AIY60641.1__M2-1 (opt1)
gggagacuuucccauucuguagcagaauuugguguugccuguggucuuggucccgcggagaagcuuaccaugagccgccggaaccccugcaaguucgagauccgcggccacugccugaacgggaagcggugccacuucucccacaacuacuucgaguggccgccccacgcccuccuggugcgccagaacuucaugcugaaccggauccucaagagcauggacaaguccaucgacacccugagcgagaucuccggcgccgcggagcuggaccgcaccgaggaguacgcccucggggucgugggcgugcuggagagcuacaucggguccaucaacaacaucacgaagcagagcgccugcgucgccauguccaagcugcucaccgagcugaacagcgacgacaucaagaagcugcgggacaacgaggagcccaacucccccaagauccgcguguacaacaccgugaucagcuacaucgaguccaaccggaagaacaacaagcagaccauccaccuccugaagcgccugccggccgacguccucaagaagacgaucaagaacacccuggacauccacaagagcaucaccaucaacaaccccaaggaguccaccgugaacgacacgaacgaccacgcgaagaacaacgacaccaccugaggacuagucccuguucccagagcccacuuuuuuuucuuuuuuugaaauaaaauagccugucuuucagaucuaaaaaaaaaaaaaaaaaaaaaaaaaaaaaaaaaaaaaaaaaaaaaaaaaaaaaaaaaaaaaaaaugcaucccccccccccccccccccccccccccccccaaaggcucuuuucagagccaccagaauu

SEQ ID NO: 20994 - RNA, 853 nt, Artificial Sequence
  mRNA product Design a-5 comprising derived and/or modified sequence from HRSV(Memphis-37)__AIY60641.1__M2-1 (opt2)
gggagacuuucccauucuguagcagaauuugguguugccuguggucuuggucccgcggagaagcuuaccaugucccgccgcaaccccugcaaguucgagauccgcggccacugccucaacggcaagcgcugccacuucucccacaacuacuucgaguggcccccccacgcccuccucguccgccagaacuucaugcucaaccgcauccucaaguccauggacaaguccaucgacacccucuccgagaucuccggcgccgccgagcucgaccgcaccgaggaguacgcccucggcgucgucggcguccucgaguccuacaucggcuccaucaacaacaucaccaagcaguccgccugcgucgccauguccaagcuccucaccgagcucaacuccgacgacaucaagaagcuccgcgacaacgaggagcccaacucccccaagauccgcgucuacaacaccgucaucuccuacaucgaguccaaccgcaagaacaacaagcagaccauccaccuccucaagcgccuccccgccgacguccucaagaagaccaucaagaacacccucgacauccacaaguccaucaccaucaacaaccccaaggaguccaccgucaacgacaccaacgaccacgccaagaacaacgacaccaccugaggacuagucccuguucccagagcccacuuuuuuuucuuuuuuugaaauaaaauagccugucuuucagaucuaaaaaaaaaaaaaaaaaaaaaaaaaaaaaaaaaaaaaaaaaaaaaaaaaaaaaaaaaaaaaaaaugcaucccccccccccccccccccccccccccccccaaaggcucuuuucagagccaccagaauu

SEQ ID NO: 20995 - RNA, 853 nt, Artificial Sequence
  mRNA product Design a-5 comprising derived and/or modified sequence from HRSV(Memphis-37)__AIY60641.1__M2-1 (opt3)
gggagacuuucccauucuguagcagaauuugguguugccuguggucuuggucccgcggagaagcuuaccaugagcagaaggaaccccugcaaguucgagauccggggccacugucugaaugggaaacgcugccauuuuucccacaacuacuucgaauggccuccacaugcacuccuugugcgacagaauuuuaugcugaaccguauuuugaagucuauggacaaaucaauagauaccuuaagugagaucagcggagcugcagaacuggacagaacagaggaauaugcccuaggugucguuggcgugcucgaguccuacauugggucuaucaauaacauuacuaagcaaucggcguguguagcuaugucaaaacugcuuacggagcugaauagcgaugacaucaagaaguugagggauaacgaggaaccgaauagucccaaaauacggguguauaacaccgucaucuccuacauugaaucuaaucgcaagaacaauaaacagacaauccaccuccugaagagacugccugccgacgugcucaaaaagacuauuaagaacaccuuagauauccauaaaagcauaacaauuaauaacccaaaggaguccaccguuaacgacacuaaugaucacgccaaaaacaaugacacaaccugaggacuagucccuguucccagagcccacuuuuuuuucuuuuuuugaaauaaaauagccugucuuucagaucuaaaaaaaaaaaaaaaaaaaaaaaaaaaaaaaaaaaaaaaaaaaaaaaaaaaaaaaaaaaaaaaaugcaucccccccccccccccccccccccccccccccaaaggcucuuuucagagccaccagaauu

SEQ ID NO: 20996 - RNA, 853 nt, Artificial Sequence
  mRNA product Design a-5 comprising derived and/or modified sequence from HRSV(Memphis-37)__AIY60641.1__M2-1 (opt4)
gggagacuuucccauucuguagcagaauuugguguugccuguggucuuggucccgcggagaagcuuaccaugagcagaagaaaccccugcaaguucgagaucagaggccacugccugaacggcaagagaugccacuucagccacaacuacuucgaguggcccccccacgcccugcuggugagacagaacuucaugcugaacagaauccugaagagcauggacaagagcaucgacacccugagcgagaucagcggcgccgccgagcuggacagaaccgaggaguacgcccugggcguggugggcgugcuggagagcuacaucggcagcaucaacaacaucaccaagcagagcgccugcguggccaugagcaagcugcugaccgagcugaacagcgacgacaucaagaagcugagagacaacgaggagcccaacagccccaagaucagaguguacaacaccgugaucagcuacaucgagagcaacagaaagaacaacaagcagaccauccaccugcugaagagacugcccgccgacgugcugaagaagaccaucaagaacacccuggacauccacaagagcaucaccaucaacaaccccaaggagagcaccgugaacgacaccaacgaccacgccaagaacaacgacaccaccugaggacuagucccuguucccagagcccacuuuuuuuucuuuuuuugaaauaaaauagccugucuuucagaucuaaaaaaaaaaaaaaaaaaaaaaaaaaaaaaaaaaaaaaaaaaaaaaaaaaaaaaaaaaaaaaaaugcaucccccccccccccccccccccccccccccccaaaggcucuuuucagagccaccagaauu

SEQ ID NO: 20997 - RNA, 853 nt, Artificial Sequence
  mRNA product Design a-5 comprising derived and/or modified sequence from HRSV(Memphis-37)__AIY60641.1__M2-1 (opt5)
gggagacuuucccauucuguagcagaauuugguguugccuguggucuuggucccgcggagaagcuuaccaugagcagacggaaccccugcaaguucgagauccgcggccacugucugaaugggaaaagaugccauuuuucccacaacuacuucgaauggccuccgcaugcccuccuggugcggcagaauuuuaugcuuaaccgcauucugaagucuauggacaaaagcaucgauacccucuccgagauuucuggagcugccgaacuggacagaacagaggaauaugcgcuuggcgucguuggggugcuggagagcuacaucggauccauuaauaacaucacgaagcaaucugcuuguguggccaugagcaaacuccugaccgagcucaauuccgaugacaucaagaagcugcgggauaacgaggaacccaauagcccuaaaauucgcgucuauaacacagugaucucuuacauugaauccaauagaaagaacaauaaacagaccauccaucugcuuaagcggcugcccgccgacguucucaaaaagacaauuaagaacacccuggauauccacaaaagcauuacaaucaauaacccuaaggagucuaccgugaacgacacgaaugaucacgcuaaaaacaaugacaccacaugaggacuagucccuguucccagagcccacuuuuuuuucuuuuuuugaaauaaaauagccugucuuucagaucuaaaaaaaaaaaaaaaaaaaaaaaaaaaaaaaaaaaaaaaaaaaaaaaaaaaaaaaaaaaaaaaaugcaucccccccccccccccccccccccccccccccaaaggcucuuuucagagccaccagaauu

SEQ ID NO: 20998 - RNA, 853 nt, Artificial Sequence
  mRNA product Design a-5 comprising derived and/or modified sequence from HRSV(Memphis-37)__AIY60641.1__M2-1 (opt6)
gggagacuuucccauucuguagcagaauuugguguugccuguggucuuggucccgcggagaagcuuaccauguccagacgaaacccaugcaaauucgaaauaagaggacacugccuaaacggaaaaagaugccacuucucacacaacuacuucgaauggccaccacacgcacuccucguaagacaaaacuucaugcuaaacagaauacuaaaaucaauggacaaaucaauagacacacucucagaaauaucaggagcagcagaacuagaccgaacagaagaauacgcacuaggaguaguaggaguacuagaauccuacauaggaucaauaaacaacauaacaaaacaaucagcaugcguagcaaugucaaaacuacuaacagaauuaaacucagacgacauaaaaaaacuaagagacaacgaagaaccaaacucaccaaaaauaagaguauacaacaccguaauaucauacauagaaucaaacagaaaaaacaacaaacaaacaauacaccuacuaaaaagacuaccagcagacguccuaaaaaaaacaauaaaaaacacacucgacauacacaaaucaauaaccauaaacaacccaaaagaaucaacaguaaacgacaccaacgaccacgcaaaaaacaaugacacaacauaaggacuagucccuguucccagagcccacuuuuuuuucuuuuuuugaaauaaaauagccugucuuucagaucuaaaaaaaaaaaaaaaaaaaaaaaaaaaaaaaaaaaaaaaaaaaaaaaaaaaaaaaaaaaaaaaaugcaucccccccccccccccccccccccccccccccaaaggcucuuuucagagccaccagaauu

SEQ ID NO: 20999 - RNA, 853 nt, Artificial Sequence
  mRNA product Design a-5 comprising derived and/or modified sequence from HRSV(Memphis-37)__AIY60641.1__M2-1 (opt11)
gggagacuuucccauucuguagcagaauuugguguugccuguggucuuggucccgcggagaagcuuaccaugucccgacgcaaccccugcaaauucgaaauccgaggccacugccucaacggcaaacgcugccacuucucccacaacuacuucgaauggcccccccacgcccuccucguacgccaaaacuucaugcucaaccgaauccucaagucaauggacaaauccaucgacacccucuccgaaaucuccggcgccgccgaacucgaccgcaccgaagaauacgcccucggcgucgucggcguccucgaauccuacaucggcuccaucaacaacaucaccaaacaauccgccugcgucgccauguccaaacuccucaccgaacucaacuccgacgacaucaaaaaacuccgcgacaacgaagaacccaacucccccaaaauccgcgucuacaacaccguuaucuccuacaucgaauccaaccgaaaaaacaacaaacaaaccauccaccuccucaaacgacuccccgccgacguccucaaaaaaaccaucaaaaauacccuagacauccacaaauccaucaccaucaacaaccccaaagaauccaccgucaacgacaccaacgaccacgccaaaaacaacgacaccaccuaaggacuagucccuguucccagagcccacuuuuuuuucuuuuuuugaaauaaaauagccugucuuucagaucuaaaaaaaaaaaaaaaaaaaaaaaaaaaaaaaaaaaaaaaaaaaaaaaaaaaaaaaaaaaaaaaaugcaucccccccccccccccccccccccccccccccaaaggcucuuuucagagccaccagaauu

SEQ ID NO: 21000 - RNA, 1034 nt, Artificial Sequence
  mRNA product Design b-1 comprising derived and/or modified sequence from HRSV(Memphis-37)__AIY60641.1__M2-1 (wt)
gggagacggagacggccugcaggaccugcucucucagcccucagccgaggccuacgccgagccgagugcgcagccgacgaccgggaggagccgcagccuucaacucugagguacugugauccgcgcugcccgccgggccgccccaguccgcugcugcggcaccuccuucccucgcgcccucuucgcucgccagcgccuucccugugagccugcgucaccgcggccgccaagcuuaccaugucacgaaggaauccuugcaaauuugaaauucgaggucauugcuugaaugguaagaggugucauuuuagucauaauuauuuugaauggccaccccaugcacugcuuguaagacaaaacuuuauguuaaacagaauacuuaagucuauggauaaaagcauagauacuuuaucagaaauaaguggagcugcagaguuggacagaacugaagaguaugcccucgguguaguuggagugcuagagaguuauauaggaucaauaaauaauauaacuaaacaaucagcauguguugccaugagcaaacuccucacugaacucaacagugaugacaucaaaaaacuaagagauaaugaagagccaaauucaccuaagauaagaguguacaauacugucauaucauauauugaaagcaacaggaaaaacaauaaacaaacuauccaucuguuaaaaagauugccagcagacguauugaagaaaaccaucaaaaacacauuggauauccacaagagcauaaccaucaacaacccaaaagaaucaacuguuaaugauacaaaugaccaugccaaaaauaaugauacuaccugaggacuaguguccaccugucccuccugggcugcuggauugucucguuuuccugccaaauaaacaggaucagcgcuuuacagaucuaaaaaaaaaaaaaaaaaaaaaaaaaaaaaaaaaaaaaaaaaaaaaaaaaaaaaaaaaaaaaaaaugcaucccccccccccccccccccccccccccccccaaaggcucuuuucagagccaccagaauu

SEQ ID NO: 21001 - RNA, 1034 nt, Artificial Sequence
  mRNA product Design b-1 comprising derived and/or modified sequence from HRSV(Memphis-37)__AIY60641.1__M2-1 (opt1)
gggagacggagacggccugcaggaccugcucucucagcccucagccgaggccuacgccgagccgagugcgcagccgacgaccgggaggagccgcagccuucaacucugagguacugugauccgcgcugcccgccgggccgccccaguccgcugcugcggcaccuccuucccucgcgcccucuucgcucgccagcgccuucccugugagccugcgucaccgcggccgccaagcuuaccaugagccgccggaaccccugcaaguucgagauccgcggccacugccugaacgggaagcggugccacuucucccacaacuacuucgaguggccgccccacgcccuccuggugcgccagaacuucaugcugaaccggauccucaagagcauggacaaguccaucgacacccugagcgagaucuccggcgccgcggagcuggaccgcaccgaggaguacgcccucggggucgugggcgugcuggagagcuacaucggguccaucaacaacaucacgaagcagagcgccugcgucgccauguccaagcugcucaccgagcugaacagcgacgacaucaagaagcugcgggacaacgaggagcccaacucccccaagauccgcguguacaacaccgugaucagcuacaucgaguccaaccggaagaacaacaagcagaccauccaccuccugaagcgccugccggccgacguccucaagaagacgaucaagaacacccuggacauccacaagagcaucaccaucaacaaccccaaggaguccaccgugaacgacacgaacgaccacgcgaagaacaacgacaccaccugaggacuaguguccaccugucccuccugggcugcuggauugucucguuuuccugccaaauaaacaggaucagcgcuuuacagaucuaaaaaaaaaaaaaaaaaaaaaaaaaaaaaaaaaaaaaaaaaaaaaaaaaaaaaaaaaaaaaaaaugcaucccccccccccccccccccccccccccccccaaaggcucuuuucagagccaccagaauu

SEQ ID NO: 21002 - RNA, 1034 nt, Artificial Sequence
  mRNA product Design b-1 comprising derived and/or modified sequence from HRSV(Memphis-37)__AIY60641.1__M2-1 (opt2)
gggagacggagacggccugcaggaccugcucucucagcccucagccgaggccuacgccgagccgagugcgcagccgacgaccgggaggagccgcagccuucaacucugagguacugugauccgcgcugcccgccgggccgccccaguccgcugcugcggcaccuccuucccucgcgcccucuucgcucgccagcgccuucccugugagccugcgucaccgcggccgccaagcuuaccaugucccgccgcaaccccugcaaguucgagauccgcggccacugccucaacggcaagcgcugccacuucucccacaacuacuucgaguggcccccccacgcccuccucguccgccagaacuucaugcucaaccgcauccucaaguccauggacaaguccaucgacacccucuccgagaucuccggcgccgccgagcucgaccgcaccgaggaguacgcccucggcgucgucggcguccucgaguccuacaucggcuccaucaacaacaucaccaagcaguccgccugcgucgccauguccaagcuccucaccgagcucaacuccgacgacaucaagaagcuccgcgacaacgaggagcccaacucccccaagauccgcgucuacaacaccgucaucuccuacaucgaguccaaccgcaagaacaacaagcagaccauccaccuccucaagcgccuccccgccgacguccucaagaagaccaucaagaacacccucgacauccacaaguccaucaccaucaacaaccccaaggaguccaccgucaacgacaccaacgaccacgccaagaacaacgacaccaccugaggacuaguguccaccugucccuccugggcugcuggauugucucguuuuccugccaaauaaacaggaucagcgcuuuacagaucuaaaaaaaaaaaaaaaaaaaaaaaaaaaaaaaaaaaaaaaaaaaaaaaaaaaaaaaaaaaaaaaaugcaucccccccccccccccccccccccccccccccaaaggcucuuuucagagccaccagaauu

SEQ ID NO: 21003 - RNA, 1034 nt, Artificial Sequence
  mRNA product Design b-1 comprising derived and/or modified sequence from HRSV(Memphis-37)__AIY60641.1__M2-1 (opt3)
gggagacggagacggccugcaggaccugcucucucagcccucagccgaggccuacgccgagccgagugcgcagccgacgaccgggaggagccgcagccuucaacucugagguacugugauccgcgcugcccgccgggccgccccaguccgcugcugcggcaccuccuucccucgcgcccucuucgcucgccagcgccuucccugugagccugcgucaccgcggccgccaagcuuaccaugagcagaaggaaccccugcaaguucgagauccggggccacugucugaaugggaaacgcugccauuuuucccacaacuacuucgaauggccuccacaugcacuccuugugcgacagaauuuuaugcugaaccguauuuugaagucuauggacaaaucaauagauaccuuaagugagaucagcggagcugcagaacuggacagaacagaggaauaugcccuaggugucguuggcgugcucgaguccuacauugggucuaucaauaacauuacuaagcaaucggcguguguagcuaugucaaaacugcuuacggagcugaauagcgaugacaucaagaaguugagggauaacgaggaaccgaauagucccaaaauacggguguauaacaccgucaucuccuacauugaaucuaaucgcaagaacaauaaacagacaauccaccuccugaagagacugccugccgacgugcucaaaaagacuauuaagaacaccuuagauauccauaaaagcauaacaauuaauaacccaaaggaguccaccguuaacgacacuaaugaucacgccaaaaacaaugacacaaccugaggacuaguguccaccugucccuccugggcugcuggauugucucguuuuccugccaaauaaacaggaucagcgcuuuacagaucuaaaaaaaaaaaaaaaaaaaaaaaaaaaaaaaaaaaaaaaaaaaaaaaaaaaaaaaaaaaaaaaaugcaucccccccccccccccccccccccccccccccaaaggcucuuuucagagccaccagaauu

SEQ ID NO: 21004 - RNA, 1034 nt, Artificial Sequence
  mRNA product Design b-1 comprising derived and/or modified sequence from HRSV(Memphis-37)__AIY60641.1__M2-1 (opt4)
gggagacggagacggccugcaggaccugcucucucagcccucagccgaggccuacgccgagccgagugcgcagccgacgaccgggaggagccgcagccuucaacucugagguacugugauccgcgcugcccgccgggccgccccaguccgcugcugcggcaccuccuucccucgcgcccucuucgcucgccagcgccuucccugugagccugcgucaccgcggccgccaagcuuaccaugagcagaagaaaccccugcaaguucgagaucagaggccacugccugaacggcaagagaugccacuucagccacaacuacuucgaguggcccccccacgcccugcuggugagacagaacuucaugcugaacagaauccugaagagcauggacaagagcaucgacacccugagcgagaucagcggcgccgccgagcuggacagaaccgaggaguacgcccugggcguggugggcgugcuggagagcuacaucggcagcaucaacaacaucaccaagcagagcgccugcguggccaugagcaagcugcugaccgagcugaacagcgacgacaucaagaagcugagagacaacgaggagcccaacagccccaagaucagaguguacaacaccgugaucagcuacaucgagagcaacagaaagaacaacaagcagaccauccaccugcugaagagacugcccgccgacgugcugaagaagaccaucaagaacacccuggacauccacaagagcaucaccaucaacaaccccaaggagagcaccgugaacgacaccaacgaccacgccaagaacaacgacaccaccugaggacuaguguccaccugucccuccugggcugcuggauugucucguuuuccugccaaauaaacaggaucagcgcuuuacagaucuaaaaaaaaaaaaaaaaaaaaaaaaaaaaaaaaaaaaaaaaaaaaaaaaaaaaaaaaaaaaaaaaugcaucccccccccccccccccccccccccccccccaaaggcucuuuucagagccaccagaauu

SEQ ID NO: 21005 - RNA, 1034 nt, Artificial Sequence
  mRNA product Design b-1 comprising derived and/or modified sequence from HRSV(Memphis-37)__AIY60641.1__M2-1 (opt5)
gggagacggagacggccugcaggaccugcucucucagcccucagccgaggccuacgccgagccgagugcgcagccgacgaccgggaggagccgcagccuucaacucugagguacugugauccgcgcugcccgccgggccgccccaguccgcugcugcggcaccuccuucccucgcgcccucuucgcucgccagcgccuucccugugagccugcgucaccgcggccgccaagcuuaccaugagcagacggaaccccugcaaguucgagauccgcggccacugucugaaugggaaaagaugccauuuuucccacaacuacuucgaauggccuccgcaugcccuccuggugcggcagaauuuuaugcuuaaccgcauucugaagucuauggacaaaagcaucgauacccucuccgagauuucuggagcugccgaacuggacagaacagaggaauaugcgcuuggcgucguuggggugcuggagagcuacaucggauccauuaauaacaucacgaagcaaucugcuuguguggccaugagcaaacuccugaccgagcucaauuccgaugacaucaagaagcugcgggauaacgaggaacccaauagcccuaaaauucgcgucuauaacacagugaucucuuacauugaauccaauagaaagaacaauaaacagaccauccaucugcuuaagcggcugcccgccgacguucucaaaaagacaauuaagaacacccuggauauccacaaaagcauuacaaucaauaacccuaaggagucuaccgugaacgacacgaaugaucacgcuaaaaacaaugacaccacaugaggacuaguguccaccugucccuccugggcugcuggauugucucguuuuccugccaaauaaacaggaucagcgcuuuacagaucuaaaaaaaaaaaaaaaaaaaaaaaaaaaaaaaaaaaaaaaaaaaaaaaaaaaaaaaaaaaaaaaaugcaucccccccccccccccccccccccccccccccaaaggcucuuuucagagccaccagaauu

SEQ ID NO: 21006 - RNA, 1034 nt, Artificial Sequence
  mRNA product Design b-1 comprising derived and/or modified sequence from HRSV(Memphis-37)__AIY60641.1__M2-1 (opt6)
gggagacggagacggccugcaggaccugcucucucagcccucagccgaggccuacgccgagccgagugcgcagccgacgaccgggaggagccgcagccuucaacucugagguacugugauccgcgcugcccgccgggccgccccaguccgcugcugcggcaccuccuucccucgcgcccucuucgcucgccagcgccuucccugugagccugcgucaccgcggccgccaagcuuaccauguccagacgaaacccaugcaaauucgaaauaagaggacacugccuaaacggaaaaagaugccacuucucacacaacuacuucgaauggccaccacacgcacuccucguaagacaaaacuucaugcuaaacagaauacuaaaaucaauggacaaaucaauagacacacucucagaaauaucaggagcagcagaacuagaccgaacagaagaauacgcacuaggaguaguaggaguacuagaauccuacauaggaucaauaaacaacauaacaaaacaaucagcaugcguagcaaugucaaaacuacuaacagaauuaaacucagacgacauaaaaaaacuaagagacaacgaagaaccaaacucaccaaaaauaagaguauacaacaccguaauaucauacauagaaucaaacagaaaaaacaacaaacaaacaauacaccuacuaaaaagacuaccagcagacguccuaaaaaaaacaauaaaaaacacacucgacauacacaaaucaauaaccauaaacaacccaaaagaaucaacaguaaacgacaccaacgaccacgcaaaaaacaaugacacaacauaaggacuaguguccaccugucccuccugggcugcuggauugucucguuuuccugccaaauaaacaggaucagcgcuuuacagaucuaaaaaaaaaaaaaaaaaaaaaaaaaaaaaaaaaaaaaaaaaaaaaaaaaaaaaaaaaaaaaaaaugcaucccccccccccccccccccccccccccccccaaaggcucuuuucagagccaccagaauu

SEQ ID NO: 21007 - RNA, 1034 nt, Artificial Sequence
  mRNA product Design b-1 comprising derived and/or modified sequence from HRSV(Memphis-37)__AIY60641.1__M2-1 (opt11)
gggagacggagacggccugcaggaccugcucucucagcccucagccgaggccuacgccgagccgagugcgcagccgacgaccgggaggagccgcagccuucaacucugagguacugugauccgcgcugcccgccgggccgccccaguccgcugcugcggcaccuccuucccucgcgcccucuucgcucgccagcgccuucccugugagccugcgucaccgcggccgccaagcuuaccaugucccgacgcaaccccugcaaauucgaaauccgaggccacugccucaacggcaaacgcugccacuucucccacaacuacuucgaauggcccccccacgcccuccucguacgccaaaacuucaugcucaaccgaauccucaagucaauggacaaauccaucgacacccucuccgaaaucuccggcgccgccgaacucgaccgcaccgaagaauacgcccucggcgucgucggcguccucgaauccuacaucggcuccaucaacaacaucaccaaacaauccgccugcgucgccauguccaaacuccucaccgaacucaacuccgacgacaucaaaaaacuccgcgacaacgaagaacccaacucccccaaaauccgcgucuacaacaccguuaucuccuacaucgaauccaaccgaaaaaacaacaaacaaaccauccaccuccucaaacgacuccccgccgacguccucaaaaaaaccaucaaaaauacccuagacauccacaaauccaucaccaucaacaaccccaaagaauccaccgucaacgacaccaacgaccacgccaaaaacaacgacaccaccuaaggacuaguguccaccugucccuccugggcugcuggauugucucguuuuccugccaaauaaacaggaucagcgcuuuacagaucuaaaaaaaaaaaaaaaaaaaaaaaaaaaaaaaaaaaaaaaaaaaaaaaaaaaaaaaaaaaaaaaaugcaucccccccccccccccccccccccccccccccaaaggcucuuuucagagccaccagaauu

SEQ ID NO: 21008 - RNA, 854 nt, Artificial Sequence
  mRNA product Design b-2 comprising derived and/or modified sequence from HRSV(Memphis-37)__AIY60641.1__M2-1 (wt)
gggagagccucugcuggaguccggggaguggcguuggcugcuagagcgaagcuuaccaugucacgaaggaauccuugcaaauuugaaauucgaggucauugcuugaaugguaagaggugucauuuuagucauaauuauuuugaauggccaccccaugcacugcuuguaagacaaaacuuuauguuaaacagaauacuuaagucuauggauaaaagcauagauacuuuaucagaaauaaguggagcugcagaguuggacagaacugaagaguaugcccucgguguaguuggagugcuagagaguuauauaggaucaauaaauaauauaacuaaacaaucagcauguguugccaugagcaaacuccucacugaacucaacagugaugacaucaaaaaacuaagagauaaugaagagccaaauucaccuaagauaagaguguacaauacugucauaucauauauugaaagcaacaggaaaaacaauaaacaaacuauccaucuguuaaaaagauugccagcagacguauugaagaaaaccaucaaaaacacauuggauauccacaagagcauaaccaucaacaacccaaaagaaucaacuguuaaugauacaaaugaccaugccaaaaauaaugauacuaccugaggacuaguguccaccugucccuccugggcugcuggauugucucguuuuccugccaaauaaacaggaucagcgcuuuacagaucuaaaaaaaaaaaaaaaaaaaaaaaaaaaaaaaaaaaaaaaaaaaaaaaaaaaaaaaaaaaaaaaaugcaucccccccccccccccccccccccccccccccaaaggcucuuuucagagccaccagaauu

SEQ ID NO: 21009 - RNA, 854 nt, Artificial Sequence
  mRNA product Design b-2 comprising derived and/or modified sequence from HRSV(Memphis-37)__AIY60641.1__M2-1 (opt1)
gggagagccucugcuggaguccggggaguggcguuggcugcuagagcgaagcuuaccaugagccgccggaaccccugcaaguucgagauccgcggccacugccugaacgggaagcggugccacuucucccacaacuacuucgaguggccgccccacgcccuccuggugcgccagaacuucaugcugaaccggauccucaagagcauggacaaguccaucgacacccugagcgagaucuccggcgccgcggagcuggaccgcaccgaggaguacgcccucggggucgugggcgugcuggagagcuacaucggguccaucaacaacaucacgaagcagagcgccugcgucgccauguccaagcugcucaccgagcugaacagcgacgacaucaagaagcugcgggacaacgaggagcccaacucccccaagauccgcguguacaacaccgugaucagcuacaucgaguccaaccggaagaacaacaagcagaccauccaccuccugaagcgccugccggccgacguccucaagaagacgaucaagaacacccuggacauccacaagagcaucaccaucaacaaccccaaggaguccaccgugaacgacacgaacgaccacgcgaagaacaacgacaccaccugaggacuaguguccaccugucccuccugggcugcuggauugucucguuuuccugccaaauaaacaggaucagcgcuuuacagaucuaaaaaaaaaaaaaaaaaaaaaaaaaaaaaaaaaaaaaaaaaaaaaaaaaaaaaaaaaaaaaaaaugcaucccccccccccccccccccccccccccccccaaaggcucuuuucagagccaccagaauu

SEQ ID NO: 21010 - RNA, 854 nt, Artificial Sequence
  mRNA product Design b-2 comprising derived and/or modified sequence from HRSV(Memphis-37)__AIY60641.1__M2-1 (opt2)
gggagagccucugcuggaguccggggaguggcguuggcugcuagagcgaagcuuaccaugucccgccgcaaccccugcaaguucgagauccgcggccacugccucaacggcaagcgcugccacuucucccacaacuacuucgaguggcccccccacgcccuccucguccgccagaacuucaugcucaaccgcauccucaaguccauggacaaguccaucgacacccucuccgagaucuccggcgccgccgagcucgaccgcaccgaggaguacgcccucggcgucgucggcguccucgaguccuacaucggcuccaucaacaacaucaccaagcaguccgccugcgucgccauguccaagcuccucaccgagcucaacuccgacgacaucaagaagcuccgcgacaacgaggagcccaacucccccaagauccgcgucuacaacaccgucaucuccuacaucgaguccaaccgcaagaacaacaagcagaccauccaccuccucaagcgccuccccgccgacguccucaagaagaccaucaagaacacccucgacauccacaaguccaucaccaucaacaaccccaaggaguccaccgucaacgacaccaacgaccacgccaagaacaacgacaccaccugaggacuaguguccaccugucccuccugggcugcuggauugucucguuuuccugccaaauaaacaggaucagcgcuuuacagaucuaaaaaaaaaaaaaaaaaaaaaaaaaaaaaaaaaaaaaaaaaaaaaaaaaaaaaaaaaaaaaaaaugcaucccccccccccccccccccccccccccccccaaaggcucuuuucagagccaccagaauu

SEQ ID NO: 21011 - RNA, 854 nt, Artificial Sequence
  mRNA product Design b-2 comprising derived and/or modified sequence from HRSV(Memphis-37)__AIY60641.1__M2-1 (opt3)
gggagagccucugcuggaguccggggaguggcguuggcugcuagagcgaagcuuaccaugagcagaaggaaccccugcaaguucgagauccggggccacugucugaaugggaaacgcugccauuuuucccacaacuacuucgaauggccuccacaugcacuccuugugcgacagaauuuuaugcugaaccguauuuugaagucuauggacaaaucaauagauaccuuaagugagaucagcggagcugcagaacuggacagaacagaggaauaugcccuaggugucguuggcgugcucgaguccuacauugggucuaucaauaacauuacuaagcaaucggcguguguagcuaugucaaaacugcuuacggagcugaauagcgaugacaucaagaaguugagggauaacgaggaaccgaauagucccaaaauacggguguauaacaccgucaucuccuacauugaaucuaaucgcaagaacaauaaacagacaauccaccuccugaagagacugccugccgacgugcucaaaaagacuauuaagaacaccuuagauauccauaaaagcauaacaauuaauaacccaaaggaguccaccguuaacgacacuaaugaucacgccaaaaacaaugacacaaccugaggacuaguguccaccugucccuccugggcugcuggauugucucguuuuccugccaaauaaacaggaucagcgcuuuacagaucuaaaaaaaaaaaaaaaaaaaaaaaaaaaaaaaaaaaaaaaaaaaaaaaaaaaaaaaaaaaaaaaaugcaucccccccccccccccccccccccccccccccaaaggcucuuuucagagccaccagaauu

SEQ ID NO: 21012 - RNA, 854 nt, Artificial Sequence
  mRNA product Design b-2 comprising derived and/or modified sequence from HRSV(Memphis-37)__AIY60641.1__M2-1 (opt4)
gggagagccucugcuggaguccggggaguggcguuggcugcuagagcgaagcuuaccaugagcagaagaaaccccugcaaguucgagaucagaggccacugccugaacggcaagagaugccacuucagccacaacuacuucgaguggcccccccacgcccugcuggugagacagaacuucaugcugaacagaauccugaagagcauggacaagagcaucgacacccugagcgagaucagcggcgccgccgagcuggacagaaccgaggaguacgcccugggcguggugggcgugcuggagagcuacaucggcagcaucaacaacaucaccaagcagagcgccugcguggccaugagcaagcugcugaccgagcugaacagcgacgacaucaagaagcugagagacaacgaggagcccaacagccccaagaucagaguguacaacaccgugaucagcuacaucgagagcaacagaaagaacaacaagcagaccauccaccugcugaagagacugcccgccgacgugcugaagaagaccaucaagaacacccuggacauccacaagagcaucaccaucaacaaccccaaggagagcaccgugaacgacaccaacgaccacgccaagaacaacgacaccaccugaggacuaguguccaccugucccuccugggcugcuggauugucucguuuuccugccaaauaaacaggaucagcgcuuuacagaucuaaaaaaaaaaaaaaaaaaaaaaaaaaaaaaaaaaaaaaaaaaaaaaaaaaaaaaaaaaaaaaaaugcaucccccccccccccccccccccccccccccccaaaggcucuuuucagagccaccagaauu

SEQ ID NO: 21013 - RNA, 854 nt, Artificial Sequence
  mRNA product Design b-2 comprising derived and/or modified sequence from HRSV(Memphis-37)__AIY60641.1__M2-1 (opt5)
gggagagccucugcuggaguccggggaguggcguuggcugcuagagcgaagcuuaccaugagcagacggaaccccugcaaguucgagauccgcggccacugucugaaugggaaaagaugccauuuuucccacaacuacuucgaauggccuccgcaugcccuccuggugcggcagaauuuuaugcuuaaccgcauucugaagucuauggacaaaagcaucgauacccucuccgagauuucuggagcugccgaacuggacagaacagaggaauaugcgcuuggcgucguuggggugcuggagagcuacaucggauccauuaauaacaucacgaagcaaucugcuuguguggccaugagcaaacuccugaccgagcucaauuccgaugacaucaagaagcugcgggauaacgaggaacccaauagcccuaaaauucgcgucuauaacacagugaucucuuacauugaauccaauagaaagaacaauaaacagaccauccaucugcuuaagcggcugcccgccgacguucucaaaaagacaauuaagaacacccuggauauccacaaaagcauuacaaucaauaacccuaaggagucuaccgugaacgacacgaaugaucacgcuaaaaacaaugacaccacaugaggacuaguguccaccugucccuccugggcugcuggauugucucguuuuccugccaaauaaacaggaucagcgcuuuacagaucuaaaaaaaaaaaaaaaaaaaaaaaaaaaaaaaaaaaaaaaaaaaaaaaaaaaaaaaaaaaaaaaaugcaucccccccccccccccccccccccccccccccaaaggcucuuuucagagccaccagaauu

SEQ ID NO: 21014 - RNA, 854 nt, Artificial Sequence
  mRNA product Design b-2 comprising derived and/or modified sequence from HRSV(Memphis-37)__AIY60641.1__M2-1 (opt6)
gggagagccucugcuggaguccggggaguggcguuggcugcuagagcgaagcuuaccauguccagacgaaacccaugcaaauucgaaauaagaggacacugccuaaacggaaaaagaugccacuucucacacaacuacuucgaauggccaccacacgcacuccucguaagacaaaacuucaugcuaaacagaauacuaaaaucaauggacaaaucaauagacacacucucagaaauaucaggagcagcagaacuagaccgaacagaagaauacgcacuaggaguaguaggaguacuagaauccuacauaggaucaauaaacaacauaacaaaacaaucagcaugcguagcaaugucaaaacuacuaacagaauuaaacucagacgacauaaaaaaacuaagagacaacgaagaaccaaacucaccaaaaauaagaguauacaacaccguaauaucauacauagaaucaaacagaaaaaacaacaaacaaacaauacaccuacuaaaaagacuaccagcagacguccuaaaaaaaacaauaaaaaacacacucgacauacacaaaucaauaaccauaaacaacccaaaagaaucaacaguaaacgacaccaacgaccacgcaaaaaacaaugacacaacauaaggacuaguguccaccugucccuccugggcugcuggauugucucguuuuccugccaaauaaacaggaucagcgcuuuacagaucuaaaaaaaaaaaaaaaaaaaaaaaaaaaaaaaaaaaaaaaaaaaaaaaaaaaaaaaaaaaaaaaaugcaucccccccccccccccccccccccccccccccaaaggcucuuuucagagccaccagaauu

SEQ ID NO: 21015 - RNA, 854 nt, Artificial Sequence
  mRNA product Design b-2 comprising derived and/or modified sequence from HRSV(Memphis-37)__AIY60641.1__M2-1 (opt11)
gggagagccucugcuggaguccggggaguggcguuggcugcuagagcgaagcuuaccaugucccgacgcaaccccugcaaauucgaaauccgaggccacugccucaacggcaaacgcugccacuucucccacaacuacuucgaauggcccccccacgcccuccucguacgccaaaacuucaugcucaaccgaauccucaagucaauggacaaauccaucgacacccucuccgaaaucuccggcgccgccgaacucgaccgcaccgaagaauacgcccucggcgucgucggcguccucgaauccuacaucggcuccaucaacaacaucaccaaacaauccgccugcgucgccauguccaaacuccucaccgaacucaacuccgacgacaucaaaaaacuccgcgacaacgaagaacccaacucccccaaaauccgcgucuacaacaccguuaucuccuacaucgaauccaaccgaaaaaacaacaaacaaaccauccaccuccucaaacgacuccccgccgacguccucaaaaaaaccaucaaaaauacccuagacauccacaaauccaucaccaucaacaaccccaaagaauccaccgucaacgacaccaacgaccacgccaaaaacaacgacaccaccuaaggacuaguguccaccugucccuccugggcugcuggauugucucguuuuccugccaaauaaacaggaucagcgcuuuacagaucuaaaaaaaaaaaaaaaaaaaaaaaaaaaaaaaaaaaaaaaaaaaaaaaaaaaaaaaaaaaaaaaaugcaucccccccccccccccccccccccccccccccaaaggcucuuuucagagccaccagaauu

SEQ ID NO: 21016 - RNA, 874 nt, Artificial Sequence
  mRNA product Design b-3 comprising derived and/or modified sequence from HRSV(Memphis-37)__AIY60641.1__M2-1 (wt)
gggagagucccgcagucggcguccagcggcucugcuuguucgugugugugucguugcaggccuuauucaagcuuaccaugucacgaaggaauccuugcaaauuugaaauucgaggucauugcuugaaugguaagaggugucauuuuagucauaauuauuuugaauggccaccccaugcacugcuuguaagacaaaacuuuauguuaaacagaauacuuaagucuauggauaaaagcauagauacuuuaucagaaauaaguggagcugcagaguuggacagaacugaagaguaugcccucgguguaguuggagugcuagagaguuauauaggaucaauaaauaauauaacuaaacaaucagcauguguugccaugagcaaacuccucacugaacucaacagugaugacaucaaaaaacuaagagauaaugaagagccaaauucaccuaagauaagaguguacaauacugucauaucauauauugaaagcaacaggaaaaacaauaaacaaacuauccaucuguuaaaaagauugccagcagacguauugaagaaaaccaucaaaaacacauuggauauccacaagagcauaaccaucaacaacccaaaagaaucaacuguuaaugauacaaaugaccaugccaaaaauaaugauacuaccugaggacuaguguccaccugucccuccugggcugcuggauugucucguuuuccugccaaauaaacaggaucagcgcuuuacagaucuaaaaaaaaaaaaaaaaaaaaaaaaaaaaaaaaaaaaaaaaaaaaaaaaaaaaaaaaaaaaaaaaugcaucccccccccccccccccccccccccccccccaaaggcucuuuucagagccaccagaauu

SEQ ID NO: 21017 - RNA, 874 nt, Artificial Sequence
  mRNA product Design b-3 comprising derived and/or modified sequence from HRSV(Memphis-37)__AIY60641.1__M2-1 (opt1)
gggagagucccgcagucggcguccagcggcucugcuuguucgugugugugucguugcaggccuuauucaagcuuaccaugagccgccggaaccccugcaaguucgagauccgcggccacugccugaacgggaagcggugccacuucucccacaacuacuucgaguggccgccccacgcccuccuggugcgccagaacuucaugcugaaccggauccucaagagcauggacaaguccaucgacacccugagcgagaucuccggcgccgcggagcuggaccgcaccgaggaguacgcccucggggucgugggcgugcuggagagcuacaucggguccaucaacaacaucacgaagcagagcgccugcgucgccauguccaagcugcucaccgagcugaacagcgacgacaucaagaagcugcgggacaacgaggagcccaacucccccaagauccgcguguacaacaccgugaucagcuacaucgaguccaaccggaagaacaacaagcagaccauccaccuccugaagcgccugccggccgacguccucaagaagacgaucaagaacacccuggacauccacaagagcaucaccaucaacaaccccaaggaguccaccgugaacgacacgaacgaccacgcgaagaacaacgacaccaccugaggacuaguguccaccugucccuccugggcugcuggauugucucguuuuccugccaaauaaacaggaucagcgcuuuacagaucuaaaaaaaaaaaaaaaaaaaaaaaaaaaaaaaaaaaaaaaaaaaaaaaaaaaaaaaaaaaaaaaaugcaucccccccccccccccccccccccccccccccaaaggcucuuuucagagccaccagaauu

SEQ ID NO: 21018 - RNA, 874 nt, Artificial Sequence
  mRNA product Design b-3 comprising derived and/or modified sequence from HRSV(Memphis-37)__AIY60641.1__M2-1 (opt2)
gggagagucccgcagucggcguccagcggcucugcuuguucgugugugugucguugcaggccuuauucaagcuuaccaugucccgccgcaaccccugcaaguucgagauccgcggccacugccucaacggcaagcgcugccacuucucccacaacuacuucgaguggcccccccacgcccuccucguccgccagaacuucaugcucaaccgcauccucaaguccauggacaaguccaucgacacccucuccgagaucuccggcgccgccgagcucgaccgcaccgaggaguacgcccucggcgucgucggcguccucgaguccuacaucggcuccaucaacaacaucaccaagcaguccgccugcgucgccauguccaagcuccucaccgagcucaacuccgacgacaucaagaagcuccgcgacaacgaggagcccaacucccccaagauccgcgucuacaacaccgucaucuccuacaucgaguccaaccgcaagaacaacaagcagaccauccaccuccucaagcgccuccccgccgacguccucaagaagaccaucaagaacacccucgacauccacaaguccaucaccaucaacaaccccaaggaguccaccgucaacgacaccaacgaccacgccaagaacaacgacaccaccugaggacuaguguccaccugucccuccugggcugcuggauugucucguuuuccugccaaauaaacaggaucagcgcuuuacagaucuaaaaaaaaaaaaaaaaaaaaaaaaaaaaaaaaaaaaaaaaaaaaaaaaaaaaaaaaaaaaaaaaugcaucccccccccccccccccccccccccccccccaaaggcucuuuucagagccaccagaauu

SEQ ID NO: 21019 - RNA, 874 nt, Artificial Sequence
  mRNA product Design b-3 comprising derived and/or modified sequence from HRSV(Memphis-37)__AIY60641.1__M2-1 (opt3)
gggagagucccgcagucggcguccagcggcucugcuuguucgugugugugucguugcaggccuuauucaagcuuaccaugagcagaaggaaccccugcaaguucgagauccggggccacugucugaaugggaaacgcugccauuuuucccacaacuacuucgaauggccuccacaugcacuccuugugcgacagaauuuuaugcugaaccguauuuugaagucuauggacaaaucaauagauaccuuaagugagaucagcggagcugcagaacuggacagaacagaggaauaugcccuaggugucguuggcgugcucgaguccuacauugggucuaucaauaacauuacuaagcaaucggcguguguagcuaugucaaaacugcuuacggagcugaauagcgaugacaucaagaaguugagggauaacgaggaaccgaauagucccaaaauacggguguauaacaccgucaucuccuacauugaaucuaaucgcaagaacaauaaacagacaauccaccuccugaagagacugccugccgacgugcucaaaaagacuauuaagaacaccuuagauauccauaaaagcauaacaauuaauaacccaaaggaguccaccguuaacgacacuaaugaucacgccaaaaacaaugacacaaccugaggacuaguguccaccugucccuccugggcugcuggauugucucguuuuccugccaaauaaacaggaucagcgcuuuacagaucuaaaaaaaaaaaaaaaaaaaaaaaaaaaaaaaaaaaaaaaaaaaaaaaaaaaaaaaaaaaaaaaaugcaucccccccccccccccccccccccccccccccaaaggcucuuuucagagccaccagaauu

SEQ ID NO: 21020 - RNA, 874 nt, Artificial Sequence
  mRNA product Design b-3 comprising derived and/or modified sequence from HRSV(Memphis-37)__AIY60641.1__M2-1 (opt4)
gggagagucccgcagucggcguccagcggcucugcuuguucgugugugugucguugcaggccuuauucaagcuuaccaugagcagaagaaaccccugcaaguucgagaucagaggccacugccugaacggcaagagaugccacuucagccacaacuacuucgaguggcccccccacgcccugcuggugagacagaacuucaugcugaacagaauccugaagagcauggacaagagcaucgacacccugagcgagaucagcggcgccgccgagcuggacagaaccgaggaguacgcccugggcguggugggcgugcuggagagcuacaucggcagcaucaacaacaucaccaagcagagcgccugcguggccaugagcaagcugcugaccgagcugaacagcgacgacaucaagaagcugagagacaacgaggagcccaacagccccaagaucagaguguacaacaccgugaucagcuacaucgagagcaacagaaagaacaacaagcagaccauccaccugcugaagagacugcccgccgacgugcugaagaagaccaucaagaacacccuggacauccacaagagcaucaccaucaacaaccccaaggagagcaccgugaacgacaccaacgaccacgccaagaacaacgacaccaccugaggacuaguguccaccugucccuccugggcugcuggauugucucguuuuccugccaaauaaacaggaucagcgcuuuacagaucuaaaaaaaaaaaaaaaaaaaaaaaaaaaaaaaaaaaaaaaaaaaaaaaaaaaaaaaaaaaaaaaaugcaucccccccccccccccccccccccccccccccaaaggcucuuuucagagccaccagaauu

SEQ ID NO: 21021 - RNA, 874 nt, Artificial Sequence
  mRNA product Design b-3 comprising derived and/or modified sequence from HRSV(Memphis-37)__AIY60641.1__M2-1 (opt5)
gggagagucccgcagucggcguccagcggcucugcuuguucgugugugugucguugcaggccuuauucaagcuuaccaugagcagacggaaccccugcaaguucgagauccgcggccacugucugaaugggaaaagaugccauuuuucccacaacuacuucgaauggccuccgcaugcccuccuggugcggcagaauuuuaugcuuaaccgcauucugaagucuauggacaaaagcaucgauacccucuccgagauuucuggagcugccgaacuggacagaacagaggaauaugcgcuuggcgucguuggggugcuggagagcuacaucggauccauuaauaacaucacgaagcaaucugcuuguguggccaugagcaaacuccugaccgagcucaauuccgaugacaucaagaagcugcgggauaacgaggaacccaauagcccuaaaauucgcgucuauaacacagugaucucuuacauugaauccaauagaaagaacaauaaacagaccauccaucugcuuaagcggcugcccgccgacguucucaaaaagacaauuaagaacacccuggauauccacaaaagcauuacaaucaauaacccuaaggagucuaccgugaacgacacgaaugaucacgcuaaaaacaaugacaccacaugaggacuaguguccaccugucccuccugggcugcuggauugucucguuuuccugccaaauaaacaggaucagcgcuuuacagaucuaaaaaaaaaaaaaaaaaaaaaaaaaaaaaaaaaaaaaaaaaaaaaaaaaaaaaaaaaaaaaaaaugcaucccccccccccccccccccccccccccccccaaaggcucuuuucagagccaccagaauu

SEQ ID NO: 21022 - RNA, 874 nt, Artificial Sequence
  mRNA product Design b-3 comprising derived and/or modified sequence from HRSV(Memphis-37)__AIY60641.1__M2-1 (opt6)
gggagagucccgcagucggcguccagcggcucugcuuguucgugugugugucguugcaggccuuauucaagcuuaccauguccagacgaaacccaugcaaauucgaaauaagaggacacugccuaaacggaaaaagaugccacuucucacacaacuacuucgaauggccaccacacgcacuccucguaagacaaaacuucaugcuaaacagaauacuaaaaucaauggacaaaucaauagacacacucucagaaauaucaggagcagcagaacuagaccgaacagaagaauacgcacuaggaguaguaggaguacuagaauccuacauaggaucaauaaacaacauaacaaaacaaucagcaugcguagcaaugucaaaacuacuaacagaauuaaacucagacgacauaaaaaaacuaagagacaacgaagaaccaaacucaccaaaaauaagaguauacaacaccguaauaucauacauagaaucaaacagaaaaaacaacaaacaaacaauacaccuacuaaaaagacuaccagcagacguccuaaaaaaaacaauaaaaaacacacucgacauacacaaaucaauaaccauaaacaacccaaaagaaucaacaguaaacgacaccaacgaccacgcaaaaaacaaugacacaacauaaggacuaguguccaccugucccuccugggcugcuggauugucucguuuuccugccaaauaaacaggaucagcgcuuuacagaucuaaaaaaaaaaaaaaaaaaaaaaaaaaaaaaaaaaaaaaaaaaaaaaaaaaaaaaaaaaaaaaaaugcaucccccccccccccccccccccccccccccccaaaggcucuuuucagagccaccagaauu

SEQ ID NO: 21023 - RNA, 874 nt, Artificial Sequence
  mRNA product Design b-3 comprising derived and/or modified sequence from HRSV(Memphis-37)__AIY60641.1__M2-1 (opt11)
gggagagucccgcagucggcguccagcggcucugcuuguucgugugugugucguugcaggccuuauucaagcuuaccaugucccgacgcaaccccugcaaauucgaaauccgaggccacugccucaacggcaaacgcugccacuucucccacaacuacuucgaauggcccccccacgcccuccucguacgccaaaacuucaugcucaaccgaauccucaagucaauggacaaauccaucgacacccucuccgaaaucuccggcgccgccgaacucgaccgcaccgaagaauacgcccucggcgucgucggcguccucgaauccuacaucggcuccaucaacaacaucaccaaacaauccgccugcgucgccauguccaaacuccucaccgaacucaacuccgacgacaucaaaaaacuccgcgacaacgaagaacccaacucccccaaaauccgcgucuacaacaccguuaucuccuacaucgaauccaaccgaaaaaacaacaaacaaaccauccaccuccucaaacgacuccccgccgacguccucaaaaaaaccaucaaaaauacccuagacauccacaaauccaucaccaucaacaaccccaaagaauccaccgucaacgacaccaacgaccacgccaaaaacaacgacaccaccuaaggacuaguguccaccugucccuccugggcugcuggauugucucguuuuccugccaaauaaacaggaucagcgcuuuacagaucuaaaaaaaaaaaaaaaaaaaaaaaaaaaaaaaaaaaaaaaaaaaaaaaaaaaaaaaaaaaaaaaaugcaucccccccccccccccccccccccccccccccaaaggcucuuuucagagccaccagaauu

SEQ ID NO: 21024 - RNA, 925 nt, Artificial Sequence
  mRNA product Design b-4 comprising derived and/or modified sequence from HRSV(Memphis-37)__AIY60641.1__M2-1 (wt)
gggagagucccgcagucggcguccagcggcucugcuuguucgugugugugucguugcaggccuuauucaagcuuaccaugucacgaaggaauccuugcaaauuugaaauucgaggucauugcuugaaugguaagaggugucauuuuagucauaauuauuuugaauggccaccccaugcacugcuuguaagacaaaacuuuauguuaaacagaauacuuaagucuauggauaaaagcauagauacuuuaucagaaauaaguggagcugcagaguuggacagaacugaagaguaugcccucgguguaguuggagugcuagagaguuauauaggaucaauaaauaauauaacuaaacaaucagcauguguugccaugagcaaacuccucacugaacucaacagugaugacaucaaaaaacuaagagauaaugaagagccaaauucaccuaagauaagaguguacaauacugucauaucauauauugaaagcaacaggaaaaacaauaaacaaacuauccaucuguuaaaaagauugccagcagacguauugaagaaaaccaucaaaaacacauuggauauccacaagagcauaaccaucaacaacccaaaagaaucaacuguuaaugauacaaaugaccaugccaaaaauaaugauacuaccugaggacuaguaauaaggaaacuguaugaaugucugugggcaggaagugaagagauccuucuguaaagguuuuuggaauuaugucugcugaauaauaaacuuuuuugaaauaauaaaucugguagaaaaaugagaucuaaaaaaaaaaaaaaaaaaaaaaaaaaaaaaaaaaaaaaaaaaaaaaaaaaaaaaaaaaaaaaaaugcaucccccccccccccccccccccccccccccccaaaggcucuuuucagagccaccagaauu

SEQ ID NO: 21025 - RNA, 925 nt, Artificial Sequence
  mRNA product Design b-4 comprising derived and/or modified sequence from HRSV(Memphis-37)__AIY60641.1__M2-1 (opt1)
gggagagucccgcagucggcguccagcggcucugcuuguucgugugugugucguugcaggccuuauucaagcuuaccaugagccgccggaaccccugcaaguucgagauccgcggccacugccugaacgggaagcggugccacuucucccacaacuacuucgaguggccgccccacgcccuccuggugcgccagaacuucaugcugaaccggauccucaagagcauggacaaguccaucgacacccugagcgagaucuccggcgccgcggagcuggaccgcaccgaggaguacgcccucggggucgugggcgugcuggagagcuacaucggguccaucaacaacaucacgaagcagagcgccugcgucgccauguccaagcugcucaccgagcugaacagcgacgacaucaagaagcugcgggacaacgaggagcccaacucccccaagauccgcguguacaacaccgugaucagcuacaucgaguccaaccggaagaacaacaagcagaccauccaccuccugaagcgccugccggccgacguccucaagaagacgaucaagaacacccuggacauccacaagagcaucaccaucaacaaccccaaggaguccaccgugaacgacacgaacgaccacgcgaagaacaacgacaccaccugaggacuaguaauaaggaaacuguaugaaugucugugggcaggaagugaagagauccuucuguaaagguuuuuggaauuaugucugcugaauaauaaacuuuuuugaaauaauaaaucugguagaaaaaugagaucuaaaaaaaaaaaaaaaaaaaaaaaaaaaaaaaaaaaaaaaaaaaaaaaaaaaaaaaaaaaaaaaaugcaucccccccccccccccccccccccccccccccaaaggcucuuuucagagccaccagaauu

SEQ ID NO: 21026 - RNA, 925 nt, Artificial Sequence
  mRNA product Design b-4 comprising derived and/or modified sequence from HRSV(Memphis-37)__AIY60641.1__M2-1 (opt2)
gggagagucccgcagucggcguccagcggcucugcuuguucgugugugugucguugcaggccuuauucaagcuuaccaugucccgccgcaaccccugcaaguucgagauccgcggccacugccucaacggcaagcgcugccacuucucccacaacuacuucgaguggcccccccacgcccuccucguccgccagaacuucaugcucaaccgcauccucaaguccauggacaaguccaucgacacccucuccgagaucuccggcgccgccgagcucgaccgcaccgaggaguacgcccucggcgucgucggcguccucgaguccuacaucggcuccaucaacaacaucaccaagcaguccgccugcgucgccauguccaagcuccucaccgagcucaacuccgacgacaucaagaagcuccgcgacaacgaggagcccaacucccccaagauccgcgucuacaacaccgucaucuccuacaucgaguccaaccgcaagaacaacaagcagaccauccaccuccucaagcgccuccccgccgacguccucaagaagaccaucaagaacacccucgacauccacaaguccaucaccaucaacaaccccaaggaguccaccgucaacgacaccaacgaccacgccaagaacaacgacaccaccugaggacuaguaauaaggaaacuguaugaaugucugugggcaggaagugaagagauccuucuguaaagguuuuuggaauuaugucugcugaauaauaaacuuuuuugaaauaauaaaucugguagaaaaaugagaucuaaaaaaaaaaaaaaaaaaaaaaaaaaaaaaaaaaaaaaaaaaaaaaaaaaaaaaaaaaaaaaaaugcaucccccccccccccccccccccccccccccccaaaggcucuuuucagagccaccagaauu

SEQ ID NO: 21027 - RNA, 925 nt, Artificial Sequence
  mRNA product Design b-4 comprising derived and/or modified sequence from HRSV(Memphis-37)__AIY60641.1__M2-1 (opt3)
gggagagucccgcagucggcguccagcggcucugcuuguucgugugugugucguugcaggccuuauucaagcuuaccaugagcagaaggaaccccugcaaguucgagauccggggccacugucugaaugggaaacgcugccauuuuucccacaacuacuucgaauggccuccacaugcacuccuugugcgacagaauuuuaugcugaaccguauuuugaagucuauggacaaaucaauagauaccuuaagugagaucagcggagcugcagaacuggacagaacagaggaauaugcccuaggugucguuggcgugcucgaguccuacauugggucuaucaauaacauuacuaagcaaucggcguguguagcuaugucaaaacugcuuacggagcugaauagcgaugacaucaagaaguugagggauaacgaggaaccgaauagucccaaaauacggguguauaacaccgucaucuccuacauugaaucuaaucgcaagaacaauaaacagacaauccaccuccugaagagacugccugccgacgugcucaaaaagacuauuaagaacaccuuagauauccauaaaagcauaacaauuaauaacccaaaggaguccaccguuaacgacacuaaugaucacgccaaaaacaaugacacaaccugaggacuaguaauaaggaaacuguaugaaugucugugggcaggaagugaagagauccuucuguaaagguuuuuggaauuaugucugcugaauaauaaacuuuuuugaaauaauaaaucugguagaaaaaugagaucuaaaaaaaaaaaaaaaaaaaaaaaaaaaaaaaaaaaaaaaaaaaaaaaaaaaaaaaaaaaaaaaaugcaucccccccccccccccccccccccccccccccaaaggcucuuuucagagccaccagaauu

SEQ ID NO: 21028 - RNA, 925 nt, Artificial Sequence
  mRNA product Design b-4 comprising derived and/or modified sequence from HRSV(Memphis-37)__AIY60641.1__M2-1 (opt4)
gggagagucccgcagucggcguccagcggcucugcuuguucgugugugugucguugcaggccuuauucaagcuuaccaugagcagaagaaaccccugcaaguucgagaucagaggccacugccugaacggcaagagaugccacuucagccacaacuacuucgaguggcccccccacgcccugcuggugagacagaacuucaugcugaacagaauccugaagagcauggacaagagcaucgacacccugagcgagaucagcggcgccgccgagcuggacagaaccgaggaguacgcccugggcguggugggcgugcuggagagcuacaucggcagcaucaacaacaucaccaagcagagcgccugcguggccaugagcaagcugcugaccgagcugaacagcgacgacaucaagaagcugagagacaacgaggagcccaacagccccaagaucagaguguacaacaccgugaucagcuacaucgagagcaacagaaagaacaacaagcagaccauccaccugcugaagagacugcccgccgacgugcugaagaagaccaucaagaacacccuggacauccacaagagcaucaccaucaacaaccccaaggagagcaccgugaacgacaccaacgaccacgccaagaacaacgacaccaccugaggacuaguaauaaggaaacuguaugaaugucugugggcaggaagugaagagauccuucuguaaagguuuuuggaauuaugucugcugaauaauaaacuuuuuugaaauaauaaaucugguagaaaaaugagaucuaaaaaaaaaaaaaaaaaaaaaaaaaaaaaaaaaaaaaaaaaaaaaaaaaaaaaaaaaaaaaaaaugcaucccccccccccccccccccccccccccccccaaaggcucuuuucagagccaccagaauu

SEQ ID NO: 21029 - RNA, 925 nt, Artificial Sequence
  mRNA product Design b-4 comprising derived and/or modified sequence from HRSV(Memphis-37)__AIY60641.1__M2-1 (opt5)
gggagagucccgcagucggcguccagcggcucugcuuguucgugugugugucguugcaggccuuauucaagcuuaccaugagcagacggaaccccugcaaguucgagauccgcggccacugucugaaugggaaaagaugccauuuuucccacaacuacuucgaauggccuccgcaugcccuccuggugcggcagaauuuuaugcuuaaccgcauucugaagucuauggacaaaagcaucgauacccucuccgagauuucuggagcugccgaacuggacagaacagaggaauaugcgcuuggcgucguuggggugcuggagagcuacaucggauccauuaauaacaucacgaagcaaucugcuuguguggccaugagcaaacuccugaccgagcucaauuccgaugacaucaagaagcugcgggauaacgaggaacccaauagcccuaaaauucgcgucuauaacacagugaucucuuacauugaauccaauagaaagaacaauaaacagaccauccaucugcuuaagcggcugcccgccgacguucucaaaaagacaauuaagaacacccuggauauccacaaaagcauuacaaucaauaacccuaaggagucuaccgugaacgacacgaaugaucacgcuaaaaacaaugacaccacaugaggacuaguaauaaggaaacuguaugaaugucugugggcaggaagugaagagauccuucuguaaagguuuuuggaauuaugucugcugaauaauaaacuuuuuugaaauaauaaaucugguagaaaaaugagaucuaaaaaaaaaaaaaaaaaaaaaaaaaaaaaaaaaaaaaaaaaaaaaaaaaaaaaaaaaaaaaaaaugcaucccccccccccccccccccccccccccccccaaaggcucuuuucagagccaccagaauu

SEQ ID NO: 21030 - RNA, 925 nt, Artificial Sequence
  mRNA product Design b-4 comprising derived and/or modified sequence from HRSV(Memphis-37)__AIY60641.1__M2-1 (opt6)
gggagagucccgcagucggcguccagcggcucugcuuguucgugugugugucguugcaggccuuauucaagcuuaccauguccagacgaaacccaugcaaauucgaaauaagaggacacugccuaaacggaaaaagaugccacuucucacacaacuacuucgaauggccaccacacgcacuccucguaagacaaaacuucaugcuaaacagaauacuaaaaucaauggacaaaucaauagacacacucucagaaauaucaggagcagcagaacuagaccgaacagaagaauacgcacuaggaguaguaggaguacuagaauccuacauaggaucaauaaacaacauaacaaaacaaucagcaugcguagcaaugucaaaacuacuaacagaauuaaacucagacgacauaaaaaaacuaagagacaacgaagaaccaaacucaccaaaaauaagaguauacaacaccguaauaucauacauagaaucaaacagaaaaaacaacaaacaaacaauacaccuacuaaaaagacuaccagcagacguccuaaaaaaaacaauaaaaaacacacucgacauacacaaaucaauaaccauaaacaacccaaaagaaucaacaguaaacgacaccaacgaccacgcaaaaaacaaugacacaacauaaggacuaguaauaaggaaacuguaugaaugucugugggcaggaagugaagagauccuucuguaaagguuuuuggaauuaugucugcugaauaauaaacuuuuuugaaauaauaaaucugguagaaaaaugagaucuaaaaaaaaaaaaaaaaaaaaaaaaaaaaaaaaaaaaaaaaaaaaaaaaaaaaaaaaaaaaaaaaugcaucccccccccccccccccccccccccccccccaaaggcucuuuucagagccaccagaauu

SEQ ID NO: 21031 - RNA, 925 nt, Artificial Sequence
  mRNA product Design b-4 comprising derived and/or modified sequence from HRSV(Memphis-37)__AIY60641.1__M2-1 (opt11)
gggagagucccgcagucggcguccagcggcucugcuuguucgugugugugucguugcaggccuuauucaagcuuaccaugucccgacgcaaccccugcaaauucgaaauccgaggccacugccucaacggcaaacgcugccacuucucccacaacuacuucgaauggcccccccacgcccuccucguacgccaaaacuucaugcucaaccgaauccucaagucaauggacaaauccaucgacacccucuccgaaaucuccggcgccgccgaacucgaccgcaccgaagaauacgcccucggcgucgucggcguccucgaauccuacaucggcuccaucaacaacaucaccaaacaauccgccugcgucgccauguccaaacuccucaccgaacucaacuccgacgacaucaaaaaacuccgcgacaacgaagaacccaacucccccaaaauccgcgucuacaacaccguuaucuccuacaucgaauccaaccgaaaaaacaacaaacaaaccauccaccuccucaaacgacuccccgccgacguccucaaaaaaaccaucaaaaauacccuagacauccacaaauccaucaccaucaacaaccccaaagaauccaccgucaacgacaccaacgaccacgccaaaaacaacgacaccaccuaaggacuaguaauaaggaaacuguaugaaugucugugggcaggaagugaagagauccuucuguaaagguuuuuggaauuaugucugcugaauaauaaacuuuuuugaaauaauaaaucugguagaaaaaugagaucuaaaaaaaaaaaaaaaaaaaaaaaaaaaaaaaaaaaaaaaaaaaaaaaaaaaaaaaaaaaaaaaaugcaucccccccccccccccccccccccccccccccaaaggcucuuuucagagccaccagaauu

SEQ ID NO: 21032 - RNA, 987 nt, Artificial Sequence
  mRNA product Design b-5 comprising derived and/or modified sequence from HRSV(Memphis-37)__AIY60641.1__M2-1 (wt)
gggagacuccugucgggcggaaguaggaggaguagaguuuaaaaacaguacucuuuuuccgguucgggacguaguugaagcaacgacaagccggauaaccgcucuugagacaggaagcuuaccaugucacgaaggaauccuugcaaauuugaaauucgaggucauugcuugaaugguaagaggugucauuuuagucauaauuauuuugaauggccaccccaugcacugcuuguaagacaaaacuuuauguuaaacagaauacuuaagucuauggauaaaagcauagauacuuuaucagaaauaaguggagcugcagaguuggacagaacugaagaguaugcccucgguguaguuggagugcuagagaguuauauaggaucaauaaauaauauaacuaaacaaucagcauguguugccaugagcaaacuccucacugaacucaacagugaugacaucaaaaaacuaagagauaaugaagagccaaauucaccuaagauaagaguguacaauacugucauaucauauauugaaagcaacaggaaaaacaauaaacaaacuauccaucuguuaaaaagauugccagcagacguauugaagaaaaccaucaaaaacacauuggauauccacaagagcauaaccaucaacaacccaaaagaaucaacuguuaaugauacaaaugaccaugccaaaaauaaugauacuaccugaggacuaguacuggcugcaucucccuuuccucuguccuccauccuucucccaggauggugaagggggaccugguacccagugauccccaccccaggauccuaaaucaugacuuaccugcuaauaaaaacucauuggaaaagugagaagaucuaaaaaaaaaaaaaaaaaaaaaaaaaaaaaaaaaaaaaaaaaaaaaaaaaaaaaaaaaaaaaaaaugcaucccccccccccccccccccccccccccccccaaaggcucuuuucagagccaccagaauu

SEQ ID NO: 21033 - RNA, 987 nt, Artificial Sequence
  mRNA product Design b-5 comprising derived and/or modified sequence from HRSV(Memphis-37)__AIY60641.1__M2-1 (opt1)
gggagacuccugucgggcggaaguaggaggaguagaguuuaaaaacaguacucuuuuuccgguucgggacguaguugaagcaacgacaagccggauaaccgcucuugagacaggaagcuuaccaugagccgccggaaccccugcaaguucgagauccgcggccacugccugaacgggaagcggugccacuucucccacaacuacuucgaguggccgccccacgcccuccuggugcgccagaacuucaugcugaaccggauccucaagagcauggacaaguccaucgacacccugagcgagaucuccggcgccgcggagcuggaccgcaccgaggaguacgcccucggggucgugggcgugcuggagagcuacaucggguccaucaacaacaucacgaagcagagcgccugcgucgccauguccaagcugcucaccgagcugaacagcgacgacaucaagaagcugcgggacaacgaggagcccaacucccccaagauccgcguguacaacaccgugaucagcuacaucgaguccaaccggaagaacaacaagcagaccauccaccuccugaagcgccugccggccgacguccucaagaagacgaucaagaacacccuggacauccacaagagcaucaccaucaacaaccccaaggaguccaccgugaacgacacgaacgaccacgcgaagaacaacgacaccaccugaggacuaguacuggcugcaucucccuuuccucuguccuccauccuucucccaggauggugaagggggaccugguacccagugauccccaccccaggauccuaaaucaugacuuaccugcuaauaaaaacucauuggaaaagugagaagaucuaaaaaaaaaaaaaaaaaaaaaaaaaaaaaaaaaaaaaaaaaaaaaaaaaaaaaaaaaaaaaaaaugcaucccccccccccccccccccccccccccccccaaaggcucuuuucagagccaccagaauu

SEQ ID NO: 21034 - RNA, 987 nt, Artificial Sequence
  mRNA product Design b-5 comprising derived and/or modified sequence from HRSV(Memphis-37)__AIY60641.1__M2-1 (opt2)
gggagacuccugucgggcggaaguaggaggaguagaguuuaaaaacaguacucuuuuuccgguucgggacguaguugaagcaacgacaagccggauaaccgcucuugagacaggaagcuuaccaugucccgccgcaaccccugcaaguucgagauccgcggccacugccucaacggcaagcgcugccacuucucccacaacuacuucgaguggcccccccacgcccuccucguccgccagaacuucaugcucaaccgcauccucaaguccauggacaaguccaucgacacccucuccgagaucuccggcgccgccgagcucgaccgcaccgaggaguacgcccucggcgucgucggcguccucgaguccuacaucggcuccaucaacaacaucaccaagcaguccgccugcgucgccauguccaagcuccucaccgagcucaacuccgacgacaucaagaagcuccgcgacaacgaggagcccaacucccccaagauccgcgucuacaacaccgucaucuccuacaucgaguccaaccgcaagaacaacaagcagaccauccaccuccucaagcgccuccccgccgacguccucaagaagaccaucaagaacacccucgacauccacaaguccaucaccaucaacaaccccaaggaguccaccgucaacgacaccaacgaccacgccaagaacaacgacaccaccugaggacuaguacuggcugcaucucccuuuccucuguccuccauccuucucccaggauggugaagggggaccugguacccagugauccccaccccaggauccuaaaucaugacuuaccugcuaauaaaaacucauuggaaaagugagaagaucuaaaaaaaaaaaaaaaaaaaaaaaaaaaaaaaaaaaaaaaaaaaaaaaaaaaaaaaaaaaaaaaaugcaucccccccccccccccccccccccccccccccaaaggcucuuuucagagccaccagaauu

SEQ ID NO: 21035 - RNA, 987 nt, Artificial Sequence
  mRNA product Design b-5 comprising derived and/or modified sequence from HRSV(Memphis-37)__AIY60641.1__M2-1 (opt3)
gggagacuccugucgggcggaaguaggaggaguagaguuuaaaaacaguacucuuuuuccgguucgggacguaguugaagcaacgacaagccggauaaccgcucuugagacaggaagcuuaccaugagcagaaggaaccccugcaaguucgagauccggggccacugucugaaugggaaacgcugccauuuuucccacaacuacuucgaauggccuccacaugcacuccuugugcgacagaauuuuaugcugaaccguauuuugaagucuauggacaaaucaauagauaccuuaagugagaucagcggagcugcagaacuggacagaacagaggaauaugcccuaggugucguuggcgugcucgaguccuacauugggucuaucaauaacauuacuaagcaaucggcguguguagcuaugucaaaacugcuuacggagcugaauagcgaugacaucaagaaguugagggauaacgaggaaccgaauagucccaaaauacggguguauaacaccgucaucuccuacauugaaucuaaucgcaagaacaauaaacagacaauccaccuccugaagagacugccugccgacgugcucaaaaagacuauuaagaacaccuuagauauccauaaaagcauaacaauuaauaacccaaaggaguccaccguuaacgacacuaaugaucacgccaaaaacaaugacacaaccugaggacuaguacuggcugcaucucccuuuccucuguccuccauccuucucccaggauggugaagggggaccugguacccagugauccccaccccaggauccuaaaucaugacuuaccugcuaauaaaaacucauuggaaaagugagaagaucuaaaaaaaaaaaaaaaaaaaaaaaaaaaaaaaaaaaaaaaaaaaaaaaaaaaaaaaaaaaaaaaaugcaucccccccccccccccccccccccccccccccaaaggcucuuuucagagccaccagaauu

SEQ ID NO: 21036 - RNA, 987 nt, Artificial Sequence
  mRNA product Design b-5 comprising derived and/or modified sequence from HRSV(Memphis-37)__AIY60641.1__M2-1 (opt4)
gggagacuccugucgggcggaaguaggaggaguagaguuuaaaaacaguacucuuuuuccgguucgggacguaguugaagcaacgacaagccggauaaccgcucuugagacaggaagcuuaccaugagcagaagaaaccccugcaaguucgagaucagaggccacugccugaacggcaagagaugccacuucagccacaacuacuucgaguggcccccccacgcccugcuggugagacagaacuucaugcugaacagaauccugaagagcauggacaagagcaucgacacccugagcgagaucagcggcgccgccgagcuggacagaaccgaggaguacgcccugggcguggugggcgugcuggagagcuacaucggcagcaucaacaacaucaccaagcagagcgccugcguggccaugagcaagcugcugaccgagcugaacagcgacgacaucaagaagcugagagacaacgaggagcccaacagccccaagaucagaguguacaacaccgugaucagcuacaucgagagcaacagaaagaacaacaagcagaccauccaccugcugaagagacugcccgccgacgugcugaagaagaccaucaagaacacccuggacauccacaagagcaucaccaucaacaaccccaaggagagcaccgugaacgacaccaacgaccacgccaagaacaacgacaccaccugaggacuaguacuggcugcaucucccuuuccucuguccuccauccuucucccaggauggugaagggggaccugguacccagugauccccaccccaggauccuaaaucaugacuuaccugcuaauaaaaacucauuggaaaagugagaagaucuaaaaaaaaaaaaaaaaaaaaaaaaaaaaaaaaaaaaaaaaaaaaaaaaaaaaaaaaaaaaaaaaugcaucccccccccccccccccccccccccccccccaaaggcucuuuucagagccaccagaauu

SEQ ID NO: 21037 - RNA, 987 nt, Artificial Sequence
  mRNA product Design b-5 comprising derived and/or modified sequence from HRSV(Memphis-37)__AIY60641.1__M2-1 (opt5)
gggagacuccugucgggcggaaguaggaggaguagaguuuaaaaacaguacucuuuuuccgguucgggacguaguugaagcaacgacaagccggauaaccgcucuugagacaggaagcuuaccaugagcagacggaaccccugcaaguucgagauccgcggccacugucugaaugggaaaagaugccauuuuucccacaacuacuucgaauggccuccgcaugcccuccuggugcggcagaauuuuaugcuuaaccgcauucugaagucuauggacaaaagcaucgauacccucuccgagauuucuggagcugccgaacuggacagaacagaggaauaugcgcuuggcgucguuggggugcuggagagcuacaucggauccauuaauaacaucacgaagcaaucugcuuguguggccaugagcaaacuccugaccgagcucaauuccgaugacaucaagaagcugcgggauaacgaggaacccaauagcccuaaaauucgcgucuauaacacagugaucucuuacauugaauccaauagaaagaacaauaaacagaccauccaucugcuuaagcggcugcccgccgacguucucaaaaagacaauuaagaacacccuggauauccacaaaagcauuacaaucaauaacccuaaggagucuaccgugaacgacacgaaugaucacgcuaaaaacaaugacaccacaugaggacuaguacuggcugcaucucccuuuccucuguccuccauccuucucccaggauggugaagggggaccugguacccagugauccccaccccaggauccuaaaucaugacuuaccugcuaauaaaaacucauuggaaaagugagaagaucuaaaaaaaaaaaaaaaaaaaaaaaaaaaaaaaaaaaaaaaaaaaaaaaaaaaaaaaaaaaaaaaaugcaucccccccccccccccccccccccccccccccaaaggcucuuuucagagccaccagaauu

SEQ ID NO: 21038 - RNA, 987 nt, Artificial Sequence
  mRNA product Design b-5 comprising derived and/or modified sequence from HRSV(Memphis-37)__AIY60641.1__M2-1 (opt6)
gggagacuccugucgggcggaaguaggaggaguagaguuuaaaaacaguacucuuuuuccgguucgggacguaguugaagcaacgacaagccggauaaccgcucuugagacaggaagcuuaccauguccagacgaaacccaugcaaauucgaaauaagaggacacugccuaaacggaaaaagaugccacuucucacacaacuacuucgaauggccaccacacgcacuccucguaagacaaaacuucaugcuaaacagaauacuaaaaucaauggacaaaucaauagacacacucucagaaauaucaggagcagcagaacuagaccgaacagaagaauacgcacuaggaguaguaggaguacuagaauccuacauaggaucaauaaacaacauaacaaaacaaucagcaugcguagcaaugucaaaacuacuaacagaauuaaacucagacgacauaaaaaaacuaagagacaacgaagaaccaaacucaccaaaaauaagaguauacaacaccguaauaucauacauagaaucaaacagaaaaaacaacaaacaaacaauacaccuacuaaaaagacuaccagcagacguccuaaaaaaaacaauaaaaaacacacucgacauacacaaaucaauaaccauaaacaacccaaaagaaucaacaguaaacgacaccaacgaccacgcaaaaaacaaugacacaacauaaggacuaguacuggcugcaucucccuuuccucuguccuccauccuucucccaggauggugaagggggaccugguacccagugauccccaccccaggauccuaaaucaugacuuaccugcuaauaaaaacucauuggaaaagugagaagaucuaaaaaaaaaaaaaaaaaaaaaaaaaaaaaaaaaaaaaaaaaaaaaaaaaaaaaaaaaaaaaaaaugcaucccccccccccccccccccccccccccccccaaaggcucuuuucagagccaccagaauu

SEQ ID NO: 21039 - RNA, 987 nt, Artificial Sequence
  mRNA product Design b-5 comprising derived and/or modified sequence from HRSV(Memphis-37)__AIY60641.1__M2-1 (opt11)
gggagacuccugucgggcggaaguaggaggaguagaguuuaaaaacaguacucuuuuuccgguucgggacguaguugaagcaacgacaagccggauaaccgcucuugagacaggaagcuuaccaugucccgacgcaaccccugcaaauucgaaauccgaggccacugccucaacggcaaacgcugccacuucucccacaacuacuucgaauggcccccccacgcccuccucguacgccaaaacuucaugcucaaccgaauccucaagucaauggacaaauccaucgacacccucuccgaaaucuccggcgccgccgaacucgaccgcaccgaagaauacgcccucggcgucgucggcguccucgaauccuacaucggcuccaucaacaacaucaccaaacaauccgccugcgucgccauguccaaacuccucaccgaacucaacuccgacgacaucaaaaaacuccgcgacaacgaagaacccaacucccccaaaauccgcgucuacaacaccguuaucuccuacaucgaauccaaccgaaaaaacaacaaacaaaccauccaccuccucaaacgacuccccgccgacguccucaaaaaaaccaucaaaaauacccuagacauccacaaauccaucaccaucaacaaccccaaagaauccaccgucaacgacaccaacgaccacgccaaaaacaacgacaccaccuaaggacuaguacuggcugcaucucccuuuccucuguccuccauccuucucccaggauggugaagggggaccugguacccagugauccccaccccaggauccuaaaucaugacuuaccugcuaauaaaaacucauuggaaaagugagaagaucuaaaaaaaaaaaaaaaaaaaaaaaaaaaaaaaaaaaaaaaaaaaaaaaaaaaaaaaaaaaaaaaaugcaucccccccccccccccccccccccccccccccaaaggcucuuuucagagccaccagaauu

SEQ ID NO: 21040 - RNA, 893 nt, Artificial Sequence
  mRNA product Design c-1 comprising derived and/or modified sequence from HRSV(Memphis-37)__AIY60641.1__M2-1 (wt)
gggagaguccgcucagccagguugcagaagcggcuuagcguguguccuaaucuucucucugcguguagguaggccugugccgcaaacaagcuuaccaugucacgaaggaauccuugcaaauuugaaauucgaggucauugcuugaaugguaagaggugucauuuuagucauaauuauuuugaauggccaccccaugcacugcuuguaagacaaaacuuuauguuaaacagaauacuuaagucuauggauaaaagcauagauacuuuaucagaaauaaguggagcugcagaguuggacagaacugaagaguaugcccucgguguaguuggagugcuagagaguuauauaggaucaauaaauaauauaacuaaacaaucagcauguguugccaugagcaaacuccucacugaacucaacagugaugacaucaaaaaacuaagagauaaugaagagccaaauucaccuaagauaagaguguacaauacugucauaucauauauugaaagcaacaggaaaaacaauaaacaaacuauccaucuguuaaaaagauugccagcagacguauugaagaaaaccaucaaaaacacauuggauauccacaagagcauaaccaucaacaacccaaaagaaucaacuguuaaugauacaaaugaccaugccaaaaauaaugauacuaccugaggacuaguguccaccugucccuccugggcugcuggauugucucguuuuccugccaaauaaacaggaucagcgcuuuacagaucuaaaaaaaaaaaaaaaaaaaaaaaaaaaaaaaaaaaaaaaaaaaaaaaaaaaaaaaaaaaaaaaaugcaucccccccccccccccccccccccccccccccaaaggcucuuuucagagccaccagaauu

SEQ ID NO: 21041 - RNA, 893 nt, Artificial Sequence
  mRNA product Design c-1 comprising derived and/or modified sequence from HRSV(Memphis-37)__AIY60641.1__M2-1 (opt1)
gggagaguccgcucagccagguugcagaagcggcuuagcguguguccuaaucuucucucugcguguagguaggccugugccgcaaacaagcuuaccaugagccgccggaaccccugcaaguucgagauccgcggccacugccugaacgggaagcggugccacuucucccacaacuacuucgaguggccgccccacgcccuccuggugcgccagaacuucaugcugaaccggauccucaagagcauggacaaguccaucgacacccugagcgagaucuccggcgccgcggagcuggaccgcaccgaggaguacgcccucggggucgugggcgugcuggagagcuacaucggguccaucaacaacaucacgaagcagagcgccugcgucgccauguccaagcugcucaccgagcugaacagcgacgacaucaagaagcugcgggacaacgaggagcccaacucccccaagauccgcguguacaacaccgugaucagcuacaucgaguccaaccggaagaacaacaagcagaccauccaccuccugaagcgccugccggccgacguccucaagaagacgaucaagaacacccuggacauccacaagagcaucaccaucaacaaccccaaggaguccaccgugaacgacacgaacgaccacgcgaagaacaacgacaccaccugaggacuaguguccaccugucccuccugggcugcuggauugucucguuuuccugccaaauaaacaggaucagcgcuuuacagaucuaaaaaaaaaaaaaaaaaaaaaaaaaaaaaaaaaaaaaaaaaaaaaaaaaaaaaaaaaaaaaaaaugcaucccccccccccccccccccccccccccccccaaaggcucuuuucagagccaccagaauu

SEQ ID NO: 21042 - RNA, 893 nt, Artificial Sequence
  mRNA product Design c-1 comprising derived and/or modified sequence from HRSV(Memphis-37)__AIY60641.1__M2-1 (opt2)
gggagaguccgcucagccagguugcagaagcggcuuagcguguguccuaaucuucucucugcguguagguaggccugugccgcaaacaagcuuaccaugucccgccgcaaccccugcaaguucgagauccgcggccacugccucaacggcaagcgcugccacuucucccacaacuacuucgaguggcccccccacgcccuccucguccgccagaacuucaugcucaaccgcauccucaaguccauggacaaguccaucgacacccucuccgagaucuccggcgccgccgagcucgaccgcaccgaggaguacgcccucggcgucgucggcguccucgaguccuacaucggcuccaucaacaacaucaccaagcaguccgccugcgucgccauguccaagcuccucaccgagcucaacuccgacgacaucaagaagcuccgcgacaacgaggagcccaacucccccaagauccgcgucuacaacaccgucaucuccuacaucgaguccaaccgcaagaacaacaagcagaccauccaccuccucaagcgccuccccgccgacguccucaagaagaccaucaagaacacccucgacauccacaaguccaucaccaucaacaaccccaaggaguccaccgucaacgacaccaacgaccacgccaagaacaacgacaccaccugaggacuaguguccaccugucccuccugggcugcuggauugucucguuuuccugccaaauaaacaggaucagcgcuuuacagaucuaaaaaaaaaaaaaaaaaaaaaaaaaaaaaaaaaaaaaaaaaaaaaaaaaaaaaaaaaaaaaaaaugcaucccccccccccccccccccccccccccccccaaaggcucuuuucagagccaccagaauu

SEQ ID NO: 21043 - RNA, 893 nt, Artificial Sequence
  mRNA product Design c-1 comprising derived and/or modified sequence from HRSV(Memphis-37)__AIY60641.1__M2-1 (opt3)
gggagaguccgcucagccagguugcagaagcggcuuagcguguguccuaaucuucucucugcguguagguaggccugugccgcaaacaagcuuaccaugagcagaaggaaccccugcaaguucgagauccggggccacugucugaaugggaaacgcugccauuuuucccacaacuacuucgaauggccuccacaugcacuccuugugcgacagaauuuuaugcugaaccguauuuugaagucuauggacaaaucaauagauaccuuaagugagaucagcggagcugcagaacuggacagaacagaggaauaugcccuaggugucguuggcgugcucgaguccuacauugggucuaucaauaacauuacuaagcaaucggcguguguagcuaugucaaaacugcuuacggagcugaauagcgaugacaucaagaaguugagggauaacgaggaaccgaauagucccaaaauacggguguauaacaccgucaucuccuacauugaaucuaaucgcaagaacaauaaacagacaauccaccuccugaagagacugccugccgacgugcucaaaaagacuauuaagaacaccuuagauauccauaaaagcauaacaauuaauaacccaaaggaguccaccguuaacgacacuaaugaucacgccaaaaacaaugacacaaccugaggacuaguguccaccugucccuccugggcugcuggauugucucguuuuccugccaaauaaacaggaucagcgcuuuacagaucuaaaaaaaaaaaaaaaaaaaaaaaaaaaaaaaaaaaaaaaaaaaaaaaaaaaaaaaaaaaaaaaaugcaucccccccccccccccccccccccccccccccaaaggcucuuuucagagccaccagaauu

SEQ ID NO: 21044 - RNA, 893 nt, Artificial Sequence
  mRNA product Design c-1 comprising derived and/or modified sequence from HRSV(Memphis-37)__AIY60641.1__M2-1 (opt4)
gggagaguccgcucagccagguugcagaagcggcuuagcguguguccuaaucuucucucugcguguagguaggccugugccgcaaacaagcuuaccaugagcagaagaaaccccugcaaguucgagaucagaggccacugccugaacggcaagagaugccacuucagccacaacuacuucgaguggcccccccacgcccugcuggugagacagaacuucaugcugaacagaauccugaagagcauggacaagagcaucgacacccugagcgagaucagcggcgccgccgagcuggacagaaccgaggaguacgcccugggcguggugggcgugcuggagagcuacaucggcagcaucaacaacaucaccaagcagagcgccugcguggccaugagcaagcugcugaccgagcugaacagcgacgacaucaagaagcugagagacaacgaggagcccaacagccccaagaucagaguguacaacaccgugaucagcuacaucgagagcaacagaaagaacaacaagcagaccauccaccugcugaagagacugcccgccgacgugcugaagaagaccaucaagaacacccuggacauccacaagagcaucaccaucaacaaccccaaggagagcaccgugaacgacaccaacgaccacgccaagaacaacgacaccaccugaggacuaguguccaccugucccuccugggcugcuggauugucucguuuuccugccaaauaaacaggaucagcgcuuuacagaucuaaaaaaaaaaaaaaaaaaaaaaaaaaaaaaaaaaaaaaaaaaaaaaaaaaaaaaaaaaaaaaaaugcaucccccccccccccccccccccccccccccccaaaggcucuuuucagagccaccagaauu

SEQ ID NO: 21045 - RNA, 893 nt, Artificial Sequence
  mRNA product Design c-1 comprising derived and/or modified sequence from HRSV(Memphis-37)__AIY60641.1__M2-1 (opt5)
gggagaguccgcucagccagguugcagaagcggcuuagcguguguccuaaucuucucucugcguguagguaggccugugccgcaaacaagcuuaccaugagcagacggaaccccugcaaguucgagauccgcggccacugucugaaugggaaaagaugccauuuuucccacaacuacuucgaauggccuccgcaugcccuccuggugcggcagaauuuuaugcuuaaccgcauucugaagucuauggacaaaagcaucgauacccucuccgagauuucuggagcugccgaacuggacagaacagaggaauaugcgcuuggcgucguuggggugcuggagagcuacaucggauccauuaauaacaucacgaagcaaucugcuuguguggccaugagcaaacuccugaccgagcucaauuccgaugacaucaagaagcugcgggauaacgaggaacccaauagcccuaaaauucgcgucuauaacacagugaucucuuacauugaauccaauagaaagaacaauaaacagaccauccaucugcuuaagcggcugcccgccgacguucucaaaaagacaauuaagaacacccuggauauccacaaaagcauuacaaucaauaacccuaaggagucuaccgugaacgacacgaaugaucacgcuaaaaacaaugacaccacaugaggacuaguguccaccugucccuccugggcugcuggauugucucguuuuccugccaaauaaacaggaucagcgcuuuacagaucuaaaaaaaaaaaaaaaaaaaaaaaaaaaaaaaaaaaaaaaaaaaaaaaaaaaaaaaaaaaaaaaaugcaucccccccccccccccccccccccccccccccaaaggcucuuuucagagccaccagaauu

SEQ ID NO: 21046 - RNA, 893 nt, Artificial Sequence
  mRNA product Design c-1 comprising derived and/or modified sequence from HRSV(Memphis-37)__AIY60641.1__M2-1 (opt6)
gggagaguccgcucagccagguugcagaagcggcuuagcguguguccuaaucuucucucugcguguagguaggccugugccgcaaacaagcuuaccauguccagacgaaacccaugcaaauucgaaauaagaggacacugccuaaacggaaaaagaugccacuucucacacaacuacuucgaauggccaccacacgcacuccucguaagacaaaacuucaugcuaaacagaauacuaaaaucaauggacaaaucaauagacacacucucagaaauaucaggagcagcagaacuagaccgaacagaagaauacgcacuaggaguaguaggaguacuagaauccuacauaggaucaauaaacaacauaacaaaacaaucagcaugcguagcaaugucaaaacuacuaacagaauuaaacucagacgacauaaaaaaacuaagagacaacgaagaaccaaacucaccaaaaauaagaguauacaacaccguaauaucauacauagaaucaaacagaaaaaacaacaaacaaacaauacaccuacuaaaaagacuaccagcagacguccuaaaaaaaacaauaaaaaacacacucgacauacacaaaucaauaaccauaaacaacccaaaagaaucaacaguaaacgacaccaacgaccacgcaaaaaacaaugacacaacauaaggacuaguguccaccugucccuccugggcugcuggauugucucguuuuccugccaaauaaacaggaucagcgcuuuacagaucuaaaaaaaaaaaaaaaaaaaaaaaaaaaaaaaaaaaaaaaaaaaaaaaaaaaaaaaaaaaaaaaaugcaucccccccccccccccccccccccccccccccaaaggcucuuuucagagccaccagaauu

SEQ ID NO: 21047 - RNA, 893 nt, Artificial Sequence
  mRNA product Design c-1 comprising derived and/or modified sequence from HRSV(Memphis-37)__AIY60641.1__M2-1 (opt11)
gggagaguccgcucagccagguugcagaagcggcuuagcguguguccuaaucuucucucugcguguagguaggccugugccgcaaacaagcuuaccaugucccgacgcaaccccugcaaauucgaaauccgaggccacugccucaacggcaaacgcugccacuucucccacaacuacuucgaauggcccccccacgcccuccucguacgccaaaacuucaugcucaaccgaauccucaagucaauggacaaauccaucgacacccucuccgaaaucuccggcgccgccgaacucgaccgcaccgaagaauacgcccucggcgucgucggcguccucgaauccuacaucggcuccaucaacaacaucaccaaacaauccgccugcgucgccauguccaaacuccucaccgaacucaacuccgacgacaucaaaaaacuccgcgacaacgaagaacccaacucccccaaaauccgcgucuacaacaccguuaucuccuacaucgaauccaaccgaaaaaacaacaaacaaaccauccaccuccucaaacgacuccccgccgacguccucaaaaaaaccaucaaaaauacccuagacauccacaaauccaucaccaucaacaaccccaaagaauccaccgucaacgacaccaacgaccacgccaaaaacaacgacaccaccuaaggacuaguguccaccugucccuccugggcugcuggauugucucguuuuccugccaaauaaacaggaucagcgcuuuacagaucuaaaaaaaaaaaaaaaaaaaaaaaaaaaaaaaaaaaaaaaaaaaaaaaaaaaaaaaaaaaaaaaaugcaucccccccccccccccccccccccccccccccaaaggcucuuuucagagccaccagaauu

SEQ ID NO: 21048 - RNA, 983 nt, Artificial Sequence
  mRNA product Design c-2 comprising derived and/or modified sequence from HRSV(Memphis-37)__AIY60641.1__M2-1 (wt)
gggagacuccugucgggcggaaguaggaggaguagaguuuaaaaacaguacucuuuuuccgguucgggacguaguugaagcaacgacaagccggauaaccgcucuugagacaggaagcuuaccaugucacgaaggaauccuugcaaauuugaaauucgaggucauugcuugaaugguaagaggugucauuuuagucauaauuauuuugaauggccaccccaugcacugcuuguaagacaaaacuuuauguuaaacagaauacuuaagucuauggauaaaagcauagauacuuuaucagaaauaaguggagcugcagaguuggacagaacugaagaguaugcccucgguguaguuggagugcuagagaguuauauaggaucaauaaauaauauaacuaaacaaucagcauguguugccaugagcaaacuccucacugaacucaacagugaugacaucaaaaaacuaagagauaaugaagagccaaauucaccuaagauaagaguguacaauacugucauaucauauauugaaagcaacaggaaaaacaauaaacaaacuauccaucuguuaaaaagauugccagcagacguauugaagaaaaccaucaaaaacacauuggauauccacaagagcauaaccaucaacaacccaaaagaaucaacuguuaaugauacaaaugaccaugccaaaaauaaugauacuaccugaggacuaguggaagcauuuuccuggcugauuaaaagaaauuacucagcuauggucaucuguuccuguuagaaggcuaugcagcauauuauauacuaugcgcauguuaugaaaugcauaauaaaaaauuuuaaaaaaucuaaaagaucuaaaaaaaaaaaaaaaaaaaaaaaaaaaaaaaaaaaaaaaaaaaaaaaaaaaaaaaaaaaaaaaaugcaucccccccccccccccccccccccccccccccaaaggcucuuuucagagccaccagaauu

SEQ ID NO: 21049 - RNA, 983 nt, Artificial Sequence
  mRNA product Design c-2 comprising derived and/or modified sequence from HRSV(Memphis-37)__AIY60641.1__M2-1 (opt1)
gggagacuccugucgggcggaaguaggaggaguagaguuuaaaaacaguacucuuuuuccgguucgggacguaguugaagcaacgacaagccggauaaccgcucuugagacaggaagcuuaccaugagccgccggaaccccugcaaguucgagauccgcggccacugccugaacgggaagcggugccacuucucccacaacuacuucgaguggccgccccacgcccuccuggugcgccagaacuucaugcugaaccggauccucaagagcauggacaaguccaucgacacccugagcgagaucuccggcgccgcggagcuggaccgcaccgaggaguacgcccucggggucgugggcgugcuggagagcuacaucggguccaucaacaacaucacgaagcagagcgccugcgucgccauguccaagcugcucaccgagcugaacagcgacgacaucaagaagcugcgggacaacgaggagcccaacucccccaagauccgcguguacaacaccgugaucagcuacaucgaguccaaccggaagaacaacaagcagaccauccaccuccugaagcgccugccggccgacguccucaagaagacgaucaagaacacccuggacauccacaagagcaucaccaucaacaaccccaaggaguccaccgugaacgacacgaacgaccacgcgaagaacaacgacaccaccugaggacuaguggaagcauuuuccuggcugauuaaaagaaauuacucagcuauggucaucuguuccuguuagaaggcuaugcagcauauuauauacuaugcgcauguuaugaaaugcauaauaaaaaauuuuaaaaaaucuaaaagaucuaaaaaaaaaaaaaaaaaaaaaaaaaaaaaaaaaaaaaaaaaaaaaaaaaaaaaaaaaaaaaaaaugcaucccccccccccccccccccccccccccccccaaaggcucuuuucagagccaccagaauu

SEQ ID NO: 21050 - RNA, 983 nt, Artificial Sequence
  mRNA product Design c-2 comprising derived and/or modified sequence from HRSV(Memphis-37)__AIY60641.1__M2-1 (opt2)
gggagacuccugucgggcggaaguaggaggaguagaguuuaaaaacaguacucuuuuuccgguucgggacguaguugaagcaacgacaagccggauaaccgcucuugagacaggaagcuuaccaugucccgccgcaaccccugcaaguucgagauccgcggccacugccucaacggcaagcgcugccacuucucccacaacuacuucgaguggcccccccacgcccuccucguccgccagaacuucaugcucaaccgcauccucaaguccauggacaaguccaucgacacccucuccgagaucuccggcgccgccgagcucgaccgcaccgaggaguacgcccucggcgucgucggcguccucgaguccuacaucggcuccaucaacaacaucaccaagcaguccgccugcgucgccauguccaagcuccucaccgagcucaacuccgacgacaucaagaagcuccgcgacaacgaggagcccaacucccccaagauccgcgucuacaacaccgucaucuccuacaucgaguccaaccgcaagaacaacaagcagaccauccaccuccucaagcgccuccccgccgacguccucaagaagaccaucaagaacacccucgacauccacaaguccaucaccaucaacaaccccaaggaguccaccgucaacgacaccaacgaccacgccaagaacaacgacaccaccugaggacuaguggaagcauuuuccuggcugauuaaaagaaauuacucagcuauggucaucuguuccuguuagaaggcuaugcagcauauuauauacuaugcgcauguuaugaaaugcauaauaaaaaauuuuaaaaaaucuaaaagaucuaaaaaaaaaaaaaaaaaaaaaaaaaaaaaaaaaaaaaaaaaaaaaaaaaaaaaaaaaaaaaaaaugcaucccccccccccccccccccccccccccccccaaaggcucuuuucagagccaccagaauu

SEQ ID NO: 21051 - RNA, 983 nt, Artificial Sequence
  mRNA product Design c-2 comprising derived and/or modified sequence from HRSV(Memphis-37)__AIY60641.1__M2-1 (opt3)
gggagacuccugucgggcggaaguaggaggaguagaguuuaaaaacaguacucuuuuuccgguucgggacguaguugaagcaacgacaagccggauaaccgcucuugagacaggaagcuuaccaugagcagaaggaaccccugcaaguucgagauccggggccacugucugaaugggaaacgcugccauuuuucccacaacuacuucgaauggccuccacaugcacuccuugugcgacagaauuuuaugcugaaccguauuuugaagucuauggacaaaucaauagauaccuuaagugagaucagcggagcugcagaacuggacagaacagaggaauaugcccuaggugucguuggcgugcucgaguccuacauugggucuaucaauaacauuacuaagcaaucggcguguguagcuaugucaaaacugcuuacggagcugaauagcgaugacaucaagaaguugagggauaacgaggaaccgaauagucccaaaauacggguguauaacaccgucaucuccuacauugaaucuaaucgcaagaacaauaaacagacaauccaccuccugaagagacugccugccgacgugcucaaaaagacuauuaagaacaccuuagauauccauaaaagcauaacaauuaauaacccaaaggaguccaccguuaacgacacuaaugaucacgccaaaaacaaugacacaaccugaggacuaguggaagcauuuuccuggcugauuaaaagaaauuacucagcuauggucaucuguuccuguuagaaggcuaugcagcauauuauauacuaugcgcauguuaugaaaugcauaauaaaaaauuuuaaaaaaucuaaaagaucuaaaaaaaaaaaaaaaaaaaaaaaaaaaaaaaaaaaaaaaaaaaaaaaaaaaaaaaaaaaaaaaaugcaucccccccccccccccccccccccccccccccaaaggcucuuuucagagccaccagaauu

SEQ ID NO: 21052 - RNA, 983 nt, Artificial Sequence
  mRNA product Design c-2 comprising derived and/or modified sequence from HRSV(Memphis-37)__AIY60641.1__M2-1 (opt4)
gggagacuccugucgggcggaaguaggaggaguagaguuuaaaaacaguacucuuuuuccgguucgggacguaguugaagcaacgacaagccggauaaccgcucuugagacaggaagcuuaccaugagcagaagaaaccccugcaaguucgagaucagaggccacugccugaacggcaagagaugccacuucagccacaacuacuucgaguggcccccccacgcccugcuggugagacagaacuucaugcugaacagaauccugaagagcauggacaagagcaucgacacccugagcgagaucagcggcgccgccgagcuggacagaaccgaggaguacgcccugggcguggugggcgugcuggagagcuacaucggcagcaucaacaacaucaccaagcagagcgccugcguggccaugagcaagcugcugaccgagcugaacagcgacgacaucaagaagcugagagacaacgaggagcccaacagccccaagaucagaguguacaacaccgugaucagcuacaucgagagcaacagaaagaacaacaagcagaccauccaccugcugaagagacugcccgccgacgugcugaagaagaccaucaagaacacccuggacauccacaagagcaucaccaucaacaaccccaaggagagcaccgugaacgacaccaacgaccacgccaagaacaacgacaccaccugaggacuaguggaagcauuuuccuggcugauuaaaagaaauuacucagcuauggucaucuguuccuguuagaaggcuaugcagcauauuauauacuaugcgcauguuaugaaaugcauaauaaaaaauuuuaaaaaaucuaaaagaucuaaaaaaaaaaaaaaaaaaaaaaaaaaaaaaaaaaaaaaaaaaaaaaaaaaaaaaaaaaaaaaaaugcaucccccccccccccccccccccccccccccccaaaggcucuuuucagagccaccagaauu

SEQ ID NO: 21053 - RNA, 983 nt, Artificial Sequence
  mRNA product Design c-2 comprising derived and/or modified sequence from HRSV(Memphis-37)__AIY60641.1__M2-1 (opt5)
gggagacuccugucgggcggaaguaggaggaguagaguuuaaaaacaguacucuuuuuccgguucgggacguaguugaagcaacgacaagccggauaaccgcucuugagacaggaagcuuaccaugagcagacggaaccccugcaaguucgagauccgcggccacugucugaaugggaaaagaugccauuuuucccacaacuacuucgaauggccuccgcaugcccuccuggugcggcagaauuuuaugcuuaaccgcauucugaagucuauggacaaaagcaucgauacccucuccgagauuucuggagcugccgaacuggacagaacagaggaauaugcgcuuggcgucguuggggugcuggagagcuacaucggauccauuaauaacaucacgaagcaaucugcuuguguggccaugagcaaacuccugaccgagcucaauuccgaugacaucaagaagcugcgggauaacgaggaacccaauagcccuaaaauucgcgucuauaacacagugaucucuuacauugaauccaauagaaagaacaauaaacagaccauccaucugcuuaagcggcugcccgccgacguucucaaaaagacaauuaagaacacccuggauauccacaaaagcauuacaaucaauaacccuaaggagucuaccgugaacgacacgaaugaucacgcuaaaaacaaugacaccacaugaggacuaguggaagcauuuuccuggcugauuaaaagaaauuacucagcuauggucaucuguuccuguuagaaggcuaugcagcauauuauauacuaugcgcauguuaugaaaugcauaauaaaaaauuuuaaaaaaucuaaaagaucuaaaaaaaaaaaaaaaaaaaaaaaaaaaaaaaaaaaaaaaaaaaaaaaaaaaaaaaaaaaaaaaaugcaucccccccccccccccccccccccccccccccaaaggcucuuuucagagccaccagaauu

SEQ ID NO: 21054 - RNA, 983 nt, Artificial Sequence
  mRNA product Design c-2 comprising derived and/or modified sequence from HRSV(Memphis-37)__AIY60641.1__M2-1 (opt6)
gggagacuccugucgggcggaaguaggaggaguagaguuuaaaaacaguacucuuuuuccgguucgggacguaguugaagcaacgacaagccggauaaccgcucuugagacaggaagcuuaccauguccagacgaaacccaugcaaauucgaaauaagaggacacugccuaaacggaaaaagaugccacuucucacacaacuacuucgaauggccaccacacgcacuccucguaagacaaaacuucaugcuaaacagaauacuaaaaucaauggacaaaucaauagacacacucucagaaauaucaggagcagcagaacuagaccgaacagaagaauacgcacuaggaguaguaggaguacuagaauccuacauaggaucaauaaacaacauaacaaaacaaucagcaugcguagcaaugucaaaacuacuaacagaauuaaacucagacgacauaaaaaaacuaagagacaacgaagaaccaaacucaccaaaaauaagaguauacaacaccguaauaucauacauagaaucaaacagaaaaaacaacaaacaaacaauacaccuacuaaaaagacuaccagcagacguccuaaaaaaaacaauaaaaaacacacucgacauacacaaaucaauaaccauaaacaacccaaaagaaucaacaguaaacgacaccaacgaccacgcaaaaaacaaugacacaacauaaggacuaguggaagcauuuuccuggcugauuaaaagaaauuacucagcuauggucaucuguuccuguuagaaggcuaugcagcauauuauauacuaugcgcauguuaugaaaugcauaauaaaaaauuuuaaaaaaucuaaaagaucuaaaaaaaaaaaaaaaaaaaaaaaaaaaaaaaaaaaaaaaaaaaaaaaaaaaaaaaaaaaaaaaaugcaucccccccccccccccccccccccccccccccaaaggcucuuuucagagccaccagaauu

SEQ ID NO: 21055 - RNA, 983 nt, Artificial Sequence
  mRNA product Design c-2 comprising derived and/or modified sequence from HRSV(Memphis-37)__AIY60641.1__M2-1 (opt11)
gggagacuccugucgggcggaaguaggaggaguagaguuuaaaaacaguacucuuuuuccgguucgggacguaguugaagcaacgacaagccggauaaccgcucuugagacaggaagcuuaccaugucccgacgcaaccccugcaaauucgaaauccgaggccacugccucaacggcaaacgcugccacuucucccacaacuacuucgaauggcccccccacgcccuccucguacgccaaaacuucaugcucaaccgaauccucaagucaauggacaaauccaucgacacccucuccgaaaucuccggcgccgccgaacucgaccgcaccgaagaauacgcccucggcgucgucggcguccucgaauccuacaucggcuccaucaacaacaucaccaaacaauccgccugcgucgccauguccaaacuccucaccgaacucaacuccgacgacaucaaaaaacuccgcgacaacgaagaacccaacucccccaaaauccgcgucuacaacaccguuaucuccuacaucgaauccaaccgaaaaaacaacaaacaaaccauccaccuccucaaacgacuccccgccgacguccucaaaaaaaccaucaaaaauacccuagacauccacaaauccaucaccaucaacaaccccaaagaauccaccgucaacgacaccaacgaccacgccaaaaacaacgacaccaccuaaggacuaguggaagcauuuuccuggcugauuaaaagaaauuacucagcuauggucaucuguuccuguuagaaggcuaugcagcauauuauauacuaugcgcauguuaugaaaugcauaauaaaaaauuuuaaaaaaucuaaaagaucuaaaaaaaaaaaaaaaaaaaaaaaaaaaaaaaaaaaaaaaaaaaaaaaaaaaaaaaaaaaaaaaaugcaucccccccccccccccccccccccccccccccaaaggcucuuuucagagccaccagaauu

SEQ ID NO: 21056 - RNA, 960 nt, Artificial Sequence
  mRNA product Design c-3 comprising derived and/or modified sequence from HRSV(Memphis-37)__AIY60641.1__M2-1 (wt)
gggagaguccgcucagccagguugcagaagcggcuuagcguguguccuaaucuucucucugcguguagguaggccugugccgcaaacaagcuuaccaugucacgaaggaauccuugcaaauuugaaauucgaggucauugcuugaaugguaagaggugucauuuuagucauaauuauuuugaauggccaccccaugcacugcuuguaagacaaaacuuuauguuaaacagaauacuuaagucuauggauaaaagcauagauacuuuaucagaaauaaguggagcugcagaguuggacagaacugaagaguaugcccucgguguaguuggagugcuagagaguuauauaggaucaauaaauaauauaacuaaacaaucagcauguguugccaugagcaaacuccucacugaacucaacagugaugacaucaaaaaacuaagagauaaugaagagccaaauucaccuaagauaagaguguacaauacugucauaucauauauugaaagcaacaggaaaaacaauaaacaaacuauccaucuguuaaaaagauugccagcagacguauugaagaaaaccaucaaaaacacauuggauauccacaagagcauaaccaucaacaacccaaaagaaucaacuguuaaugauacaaaugaccaugccaaaaauaaugauacuaccugaggacuaguacuggcugcaucucccuuuccucuguccuccauccuucucccaggauggugaagggggaccugguacccagugauccccaccccaggauccuaaaucaugacuuaccugcuaauaaaaacucauuggaaaagugagaagaucuaaaaaaaaaaaaaaaaaaaaaaaaaaaaaaaaaaaaaaaaaaaaaaaaaaaaaaaaaaaaaaaaugcaucccccccccccccccccccccccccccccccaaaggcucuuuucagagccaccagaauu

SEQ ID NO: 21057 - RNA, 960 nt, Artificial Sequence
  mRNA product Design c-3 comprising derived and/or modified sequence from HRSV(Memphis-37)__AIY60641.1__M2-1 (opt1)
gggagaguccgcucagccagguugcagaagcggcuuagcguguguccuaaucuucucucugcguguagguaggccugugccgcaaacaagcuuaccaugagccgccggaaccccugcaaguucgagauccgcggccacugccugaacgggaagcggugccacuucucccacaacuacuucgaguggccgccccacgcccuccuggugcgccagaacuucaugcugaaccggauccucaagagcauggacaaguccaucgacacccugagcgagaucuccggcgccgcggagcuggaccgcaccgaggaguacgcccucggggucgugggcgugcuggagagcuacaucggguccaucaacaacaucacgaagcagagcgccugcgucgccauguccaagcugcucaccgagcugaacagcgacgacaucaagaagcugcgggacaacgaggagcccaacucccccaagauccgcguguacaacaccgugaucagcuacaucgaguccaaccggaagaacaacaagcagaccauccaccuccugaagcgccugccggccgacguccucaagaagacgaucaagaacacccuggacauccacaagagcaucaccaucaacaaccccaaggaguccaccgugaacgacacgaacgaccacgcgaagaacaacgacaccaccugaggacuaguacuggcugcaucucccuuuccucuguccuccauccuucucccaggauggugaagggggaccugguacccagugauccccaccccaggauccuaaaucaugacuuaccugcuaauaaaaacucauuggaaaagugagaagaucuaaaaaaaaaaaaaaaaaaaaaaaaaaaaaaaaaaaaaaaaaaaaaaaaaaaaaaaaaaaaaaaaugcaucccccccccccccccccccccccccccccccaaaggcucuuuucagagccaccagaauu

SEQ ID NO: 21058 - RNA, 960 nt, Artificial Sequence
  mRNA product Design c-3 comprising derived and/or modified sequence from HRSV(Memphis-37)__AIY60641.1__M2-1 (opt2)
gggagaguccgcucagccagguugcagaagcggcuuagcguguguccuaaucuucucucugcguguagguaggccugugccgcaaacaagcuuaccaugucccgccgcaaccccugcaaguucgagauccgcggccacugccucaacggcaagcgcugccacuucucccacaacuacuucgaguggcccccccacgcccuccucguccgccagaacuucaugcucaaccgcauccucaaguccauggacaaguccaucgacacccucuccgagaucuccggcgccgccgagcucgaccgcaccgaggaguacgcccucggcgucgucggcguccucgaguccuacaucggcuccaucaacaacaucaccaagcaguccgccugcgucgccauguccaagcuccucaccgagcucaacuccgacgacaucaagaagcuccgcgacaacgaggagcccaacucccccaagauccgcgucuacaacaccgucaucuccuacaucgaguccaaccgcaagaacaacaagcagaccauccaccuccucaagcgccuccccgccgacguccucaagaagaccaucaagaacacccucgacauccacaaguccaucaccaucaacaaccccaaggaguccaccgucaacgacaccaacgaccacgccaagaacaacgacaccaccugaggacuaguacuggcugcaucucccuuuccucuguccuccauccuucucccaggauggugaagggggaccugguacccagugauccccaccccaggauccuaaaucaugacuuaccugcuaauaaaaacucauuggaaaagugagaagaucuaaaaaaaaaaaaaaaaaaaaaaaaaaaaaaaaaaaaaaaaaaaaaaaaaaaaaaaaaaaaaaaaugcaucccccccccccccccccccccccccccccccaaaggcucuuuucagagccaccagaauu

SEQ ID NO: 21059 - RNA, 960 nt, Artificial Sequence
  mRNA product Design c-3 comprising derived and/or modified sequence from HRSV(Memphis-37)__AIY60641.1__M2-1 (opt3)
gggagaguccgcucagccagguugcagaagcggcuuagcguguguccuaaucuucucucugcguguagguaggccugugccgcaaacaagcuuaccaugagcagaaggaaccccugcaaguucgagauccggggccacugucugaaugggaaacgcugccauuuuucccacaacuacuucgaauggccuccacaugcacuccuugugcgacagaauuuuaugcugaaccguauuuugaagucuauggacaaaucaauagauaccuuaagugagaucagcggagcugcagaacuggacagaacagaggaauaugcccuaggugucguuggcgugcucgaguccuacauugggucuaucaauaacauuacuaagcaaucggcguguguagcuaugucaaaacugcuuacggagcugaauagcgaugacaucaagaaguugagggauaacgaggaaccgaauagucccaaaauacggguguauaacaccgucaucuccuacauugaaucuaaucgcaagaacaauaaacagacaauccaccuccugaagagacugccugccgacgugcucaaaaagacuauuaagaacaccuuagauauccauaaaagcauaacaauuaauaacccaaaggaguccaccguuaacgacacuaaugaucacgccaaaaacaaugacacaaccugaggacuaguacuggcugcaucucccuuuccucuguccuccauccuucucccaggauggugaagggggaccugguacccagugauccccaccccaggauccuaaaucaugacuuaccugcuaauaaaaacucauuggaaaagugagaagaucuaaaaaaaaaaaaaaaaaaaaaaaaaaaaaaaaaaaaaaaaaaaaaaaaaaaaaaaaaaaaaaaaugcaucccccccccccccccccccccccccccccccaaaggcucuuuucagagccaccagaauu

SEQ ID NO: 21060 - RNA, 960 nt, Artificial Sequence
  mRNA product Design c-3 comprising derived and/or modified sequence from HRSV(Memphis-37)__AIY60641.1__M2-1 (opt4)
gggagaguccgcucagccagguugcagaagcggcuuagcguguguccuaaucuucucucugcguguagguaggccugugccgcaaacaagcuuaccaugagcagaagaaaccccugcaaguucgagaucagaggccacugccugaacggcaagagaugccacuucagccacaacuacuucgaguggcccccccacgcccugcuggugagacagaacuucaugcugaacagaauccugaagagcauggacaagagcaucgacacccugagcgagaucagcggcgccgccgagcuggacagaaccgaggaguacgcccugggcguggugggcgugcuggagagcuacaucggcagcaucaacaacaucaccaagcagagcgccugcguggccaugagcaagcugcugaccgagcugaacagcgacgacaucaagaagcugagagacaacgaggagcccaacagccccaagaucagaguguacaacaccgugaucagcuacaucgagagcaacagaaagaacaacaagcagaccauccaccugcugaagagacugcccgccgacgugcugaagaagaccaucaagaacacccuggacauccacaagagcaucaccaucaacaaccccaaggagagcaccgugaacgacaccaacgaccacgccaagaacaacgacaccaccugaggacuaguacuggcugcaucucccuuuccucuguccuccauccuucucccaggauggugaagggggaccugguacccagugauccccaccccaggauccuaaaucaugacuuaccugcuaauaaaaacucauuggaaaagugagaagaucuaaaaaaaaaaaaaaaaaaaaaaaaaaaaaaaaaaaaaaaaaaaaaaaaaaaaaaaaaaaaaaaaugcaucccccccccccccccccccccccccccccccaaaggcucuuuucagagccaccagaauu

SEQ ID NO: 21061 - RNA, 960 nt, Artificial Sequence
  mRNA product Design c-3 comprising derived and/or modified sequence from HRSV(Memphis-37)__AIY60641.1__M2-1 (opt5)
gggagaguccgcucagccagguugcagaagcggcuuagcguguguccuaaucuucucucugcguguagguaggccugugccgcaaacaagcuuaccaugagcagacggaaccccugcaaguucgagauccgcggccacugucugaaugggaaaagaugccauuuuucccacaacuacuucgaauggccuccgcaugcccuccuggugcggcagaauuuuaugcuuaaccgcauucugaagucuauggacaaaagcaucgauacccucuccgagauuucuggagcugccgaacuggacagaacagaggaauaugcgcuuggcgucguuggggugcuggagagcuacaucggauccauuaauaacaucacgaagcaaucugcuuguguggccaugagcaaacuccugaccgagcucaauuccgaugacaucaagaagcugcgggauaacgaggaacccaauagcccuaaaauucgcgucuauaacacagugaucucuuacauugaauccaauagaaagaacaauaaacagaccauccaucugcuuaagcggcugcccgccgacguucucaaaaagacaauuaagaacacccuggauauccacaaaagcauuacaaucaauaacccuaaggagucuaccgugaacgacacgaaugaucacgcuaaaaacaaugacaccacaugaggacuaguacuggcugcaucucccuuuccucuguccuccauccuucucccaggauggugaagggggaccugguacccagugauccccaccccaggauccuaaaucaugacuuaccugcuaauaaaaacucauuggaaaagugagaagaucuaaaaaaaaaaaaaaaaaaaaaaaaaaaaaaaaaaaaaaaaaaaaaaaaaaaaaaaaaaaaaaaaugcaucccccccccccccccccccccccccccccccaaaggcucuuuucagagccaccagaauu

SEQ ID NO: 21062 - RNA, 960 nt, Artificial Sequence
  mRNA product Design c-3 comprising derived and/or modified sequence from HRSV(Memphis-37)__AIY60641.1__M2-1 (opt6)
gggagaguccgcucagccagguugcagaagcggcuuagcguguguccuaaucuucucucugcguguagguaggccugugccgcaaacaagcuuaccauguccagacgaaacccaugcaaauucgaaauaagaggacacugccuaaacggaaaaagaugccacuucucacacaacuacuucgaauggccaccacacgcacuccucguaagacaaaacuucaugcuaaacagaauacuaaaaucaauggacaaaucaauagacacacucucagaaauaucaggagcagcagaacuagaccgaacagaagaauacgcacuaggaguaguaggaguacuagaauccuacauaggaucaauaaacaacauaacaaaacaaucagcaugcguagcaaugucaaaacuacuaacagaauuaaacucagacgacauaaaaaaacuaagagacaacgaagaaccaaacucaccaaaaauaagaguauacaacaccguaauaucauacauagaaucaaacagaaaaaacaacaaacaaacaauacaccuacuaaaaagacuaccagcagacguccuaaaaaaaacaauaaaaaacacacucgacauacacaaaucaauaaccauaaacaacccaaaagaaucaacaguaaacgacaccaacgaccacgcaaaaaacaaugacacaacauaaggacuaguacuggcugcaucucccuuuccucuguccuccauccuucucccaggauggugaagggggaccugguacccagugauccccaccccaggauccuaaaucaugacuuaccugcuaauaaaaacucauuggaaaagugagaagaucuaaaaaaaaaaaaaaaaaaaaaaaaaaaaaaaaaaaaaaaaaaaaaaaaaaaaaaaaaaaaaaaaugcaucccccccccccccccccccccccccccccccaaaggcucuuuucagagccaccagaauu

SEQ ID NO: 21063 - RNA, 960 nt, Artificial Sequence
  mRNA product Design c-3 comprising derived and/or modified sequence from HRSV(Memphis-37)__AIY60641.1__M2-1 (opt11)
gggagaguccgcucagccagguugcagaagcggcuuagcguguguccuaaucuucucucugcguguagguaggccugugccgcaaacaagcuuaccaugucccgacgcaaccccugcaaauucgaaauccgaggccacugccucaacggcaaacgcugccacuucucccacaacuacuucgaauggcccccccacgcccuccucguacgccaaaacuucaugcucaaccgaauccucaagucaauggacaaauccaucgacacccucuccgaaaucuccggcgccgccgaacucgaccgcaccgaagaauacgcccucggcgucgucggcguccucgaauccuacaucggcuccaucaacaacaucaccaaacaauccgccugcgucgccauguccaaacuccucaccgaacucaacuccgacgacaucaaaaaacuccgcgacaacgaagaacccaacucccccaaaauccgcgucuacaacaccguuaucuccuacaucgaauccaaccgaaaaaacaacaaacaaaccauccaccuccucaaacgacuccccgccgacguccucaaaaaaaccaucaaaaauacccuagacauccacaaauccaucaccaucaacaaccccaaagaauccaccgucaacgacaccaacgaccacgccaaaaacaacgacaccaccuaaggacuaguacuggcugcaucucccuuuccucuguccuccauccuucucccaggauggugaagggggaccugguacccagugauccccaccccaggauccuaaaucaugacuuaccugcuaauaaaaacucauuggaaaagugagaagaucuaaaaaaaaaaaaaaaaaaaaaaaaaaaaaaaaaaaaaaaaaaaaaaaaaaaaaaaaaaaaaaaaugcaucccccccccccccccccccccccccccccccaaaggcucuuuucagagccaccagaauu

SEQ ID NO: 21064 - RNA, 956 nt, Artificial Sequence
  mRNA product Design c-4 comprising derived and/or modified sequence from HRSV(Memphis-37)__AIY60641.1__M2-1 (wt)
gggagaguccgcucagccagguugcagaagcggcuuagcguguguccuaaucuucucucugcguguagguaggccugugccgcaaacaagcuuaccaugucacgaaggaauccuugcaaauuugaaauucgaggucauugcuugaaugguaagaggugucauuuuagucauaauuauuuugaauggccaccccaugcacugcuuguaagacaaaacuuuauguuaaacagaauacuuaagucuauggauaaaagcauagauacuuuaucagaaauaaguggagcugcagaguuggacagaacugaagaguaugcccucgguguaguuggagugcuagagaguuauauaggaucaauaaauaauauaacuaaacaaucagcauguguugccaugagcaaacuccucacugaacucaacagugaugacaucaaaaaacuaagagauaaugaagagccaaauucaccuaagauaagaguguacaauacugucauaucauauauugaaagcaacaggaaaaacaauaaacaaacuauccaucuguuaaaaagauugccagcagacguauugaagaaaaccaucaaaaacacauuggauauccacaagagcauaaccaucaacaacccaaaagaaucaacuguuaaugauacaaaugaccaugccaaaaauaaugauacuaccugaggacuaguggaagcauuuuccuggcugauuaaaagaaauuacucagcuauggucaucuguuccuguuagaaggcuaugcagcauauuauauacuaugcgcauguuaugaaaugcauaauaaaaaauuuuaaaaaaucuaaaagaucuaaaaaaaaaaaaaaaaaaaaaaaaaaaaaaaaaaaaaaaaaaaaaaaaaaaaaaaaaaaaaaaaugcaucccccccccccccccccccccccccccccccaaaggcucuuuucagagccaccagaauu

SEQ ID NO: 21065 - RNA, 956 nt, Artificial Sequence
  mRNA product Design c-4 comprising derived and/or modified sequence from HRSV(Memphis-37)__AIY60641.1__M2-1 (opt1)
gggagaguccgcucagccagguugcagaagcggcuuagcguguguccuaaucuucucucugcguguagguaggccugugccgcaaacaagcuuaccaugagccgccggaaccccugcaaguucgagauccgcggccacugccugaacgggaagcggugccacuucucccacaacuacuucgaguggccgccccacgcccuccuggugcgccagaacuucaugcugaaccggauccucaagagcauggacaaguccaucgacacccugagcgagaucuccggcgccgcggagcuggaccgcaccgaggaguacgcccucggggucgugggcgugcuggagagcuacaucggguccaucaacaacaucacgaagcagagcgccugcgucgccauguccaagcugcucaccgagcugaacagcgacgacaucaagaagcugcgggacaacgaggagcccaacucccccaagauccgcguguacaacaccgugaucagcuacaucgaguccaaccggaagaacaacaagcagaccauccaccuccugaagcgccugccggccgacguccucaagaagacgaucaagaacacccuggacauccacaagagcaucaccaucaacaaccccaaggaguccaccgugaacgacacgaacgaccacgcgaagaacaacgacaccaccugaggacuaguggaagcauuuuccuggcugauuaaaagaaauuacucagcuauggucaucuguuccuguuagaaggcuaugcagcauauuauauacuaugcgcauguuaugaaaugcauaauaaaaaauuuuaaaaaaucuaaaagaucuaaaaaaaaaaaaaaaaaaaaaaaaaaaaaaaaaaaaaaaaaaaaaaaaaaaaaaaaaaaaaaaaugcaucccccccccccccccccccccccccccccccaaaggcucuuuucagagccaccagaauu

SEQ ID NO: 21066 - RNA, 956 nt, Artificial Sequence
  mRNA product Design c-4 comprising derived and/or modified sequence from HRSV(Memphis-37)__AIY60641.1__M2-1 (opt2)
gggagaguccgcucagccagguugcagaagcggcuuagcguguguccuaaucuucucucugcguguagguaggccugugccgcaaacaagcuuaccaugucccgccgcaaccccugcaaguucgagauccgcggccacugccucaacggcaagcgcugccacuucucccacaacuacuucgaguggcccccccacgcccuccucguccgccagaacuucaugcucaaccgcauccucaaguccauggacaaguccaucgacacccucuccgagaucuccggcgccgccgagcucgaccgcaccgaggaguacgcccucggcgucgucggcguccucgaguccuacaucggcuccaucaacaacaucaccaagcaguccgccugcgucgccauguccaagcuccucaccgagcucaacuccgacgacaucaagaagcuccgcgacaacgaggagcccaacucccccaagauccgcgucuacaacaccgucaucuccuacaucgaguccaaccgcaagaacaacaagcagaccauccaccuccucaagcgccuccccgccgacguccucaagaagaccaucaagaacacccucgacauccacaaguccaucaccaucaacaaccccaaggaguccaccgucaacgacaccaacgaccacgccaagaacaacgacaccaccugaggacuaguggaagcauuuuccuggcugauuaaaagaaauuacucagcuauggucaucuguuccuguuagaaggcuaugcagcauauuauauacuaugcgcauguuaugaaaugcauaauaaaaaauuuuaaaaaaucuaaaagaucuaaaaaaaaaaaaaaaaaaaaaaaaaaaaaaaaaaaaaaaaaaaaaaaaaaaaaaaaaaaaaaaaugcaucccccccccccccccccccccccccccccccaaaggcucuuuucagagccaccagaauu

SEQ ID NO: 21067 - RNA, 956 nt, Artificial Sequence
  mRNA product Design c-4 comprising derived and/or modified sequence from HRSV(Memphis-37)__AIY60641.1__M2-1 (opt3)
gggagaguccgcucagccagguugcagaagcggcuuagcguguguccuaaucuucucucugcguguagguaggccugugccgcaaacaagcuuaccaugagcagaaggaaccccugcaaguucgagauccggggccacugucugaaugggaaacgcugccauuuuucccacaacuacuucgaauggccuccacaugcacuccuugugcgacagaauuuuaugcugaaccguauuuugaagucuauggacaaaucaauagauaccuuaagugagaucagcggagcugcagaacuggacagaacagaggaauaugcccuaggugucguuggcgugcucgaguccuacauugggucuaucaauaacauuacuaagcaaucggcguguguagcuaugucaaaacugcuuacggagcugaauagcgaugacaucaagaaguugagggauaacgaggaaccgaauagucccaaaauacggguguauaacaccgucaucuccuacauugaaucuaaucgcaagaacaauaaacagacaauccaccuccugaagagacugccugccgacgugcucaaaaagacuauuaagaacaccuuagauauccauaaaagcauaacaauuaauaacccaaaggaguccaccguuaacgacacuaaugaucacgccaaaaacaaugacacaaccugaggacuaguggaagcauuuuccuggcugauuaaaagaaauuacucagcuauggucaucuguuccuguuagaaggcuaugcagcauauuauauacuaugcgcauguuaugaaaugcauaauaaaaaauuuuaaaaaaucuaaaagaucuaaaaaaaaaaaaaaaaaaaaaaaaaaaaaaaaaaaaaaaaaaaaaaaaaaaaaaaaaaaaaaaaugcaucccccccccccccccccccccccccccccccaaaggcucuuuucagagccaccagaauu

SEQ ID NO: 21068 - RNA, 956 nt, Artificial Sequence
  mRNA product Design c-4 comprising derived and/or modified sequence from HRSV(Memphis-37)__AIY60641.1__M2-1 (opt4)
gggagaguccgcucagccagguugcagaagcggcuuagcguguguccuaaucuucucucugcguguagguaggccugugccgcaaacaagcuuaccaugagcagaagaaaccccugcaaguucgagaucagaggccacugccugaacggcaagagaugccacuucagccacaacuacuucgaguggcccccccacgcccugcuggugagacagaacuucaugcugaacagaauccugaagagcauggacaagagcaucgacacccugagcgagaucagcggcgccgccgagcuggacagaaccgaggaguacgcccugggcguggugggcgugcuggagagcuacaucggcagcaucaacaacaucaccaagcagagcgccugcguggccaugagcaagcugcugaccgagcugaacagcgacgacaucaagaagcugagagacaacgaggagcccaacagccccaagaucagaguguacaacaccgugaucagcuacaucgagagcaacagaaagaacaacaagcagaccauccaccugcugaagagacugcccgccgacgugcugaagaagaccaucaagaacacccuggacauccacaagagcaucaccaucaacaaccccaaggagagcaccgugaacgacaccaacgaccacgccaagaacaacgacaccaccugaggacuaguggaagcauuuuccuggcugauuaaaagaaauuacucagcuauggucaucuguuccuguuagaaggcuaugcagcauauuauauacuaugcgcauguuaugaaaugcauaauaaaaaauuuuaaaaaaucuaaaagaucuaaaaaaaaaaaaaaaaaaaaaaaaaaaaaaaaaaaaaaaaaaaaaaaaaaaaaaaaaaaaaaaaugcaucccccccccccccccccccccccccccccccaaaggcucuuuucagagccaccagaauu

SEQ ID NO: 21069 - RNA, 956 nt, Artificial Sequence
  mRNA product Design c-4 comprising derived and/or modified sequence from HRSV(Memphis-37)__AIY60641.1__M2-1 (opt5)
gggagaguccgcucagccagguugcagaagcggcuuagcguguguccuaaucuucucucugcguguagguaggccugugccgcaaacaagcuuaccaugagcagacggaaccccugcaaguucgagauccgcggccacugucugaaugggaaaagaugccauuuuucccacaacuacuucgaauggccuccgcaugcccuccuggugcggcagaauuuuaugcuuaaccgcauucugaagucuauggacaaaagcaucgauacccucuccgagauuucuggagcugccgaacuggacagaacagaggaauaugcgcuuggcgucguuggggugcuggagagcuacaucggauccauuaauaacaucacgaagcaaucugcuuguguggccaugagcaaacuccugaccgagcucaauuccgaugacaucaagaagcugcgggauaacgaggaacccaauagcccuaaaauucgcgucuauaacacagugaucucuuacauugaauccaauagaaagaacaauaaacagaccauccaucugcuuaagcggcugcccgccgacguucucaaaaagacaauuaagaacacccuggauauccacaaaagcauuacaaucaauaacccuaaggagucuaccgugaacgacacgaaugaucacgcuaaaaacaaugacaccacaugaggacuaguggaagcauuuuccuggcugauuaaaagaaauuacucagcuauggucaucuguuccuguuagaaggcuaugcagcauauuauauacuaugcgcauguuaugaaaugcauaauaaaaaauuuuaaaaaaucuaaaagaucuaaaaaaaaaaaaaaaaaaaaaaaaaaaaaaaaaaaaaaaaaaaaaaaaaaaaaaaaaaaaaaaaugcaucccccccccccccccccccccccccccccccaaaggcucuuuucagagccaccagaauu

SEQ ID NO: 21070 - RNA, 956 nt, Artificial Sequence
  mRNA product Design c-4 comprising derived and/or modified sequence from HRSV(Memphis-37)__AIY60641.1__M2-1 (opt6)
gggagaguccgcucagccagguugcagaagcggcuuagcguguguccuaaucuucucucugcguguagguaggccugugccgcaaacaagcuuaccauguccagacgaaacccaugcaaauucgaaauaagaggacacugccuaaacggaaaaagaugccacuucucacacaacuacuucgaauggccaccacacgcacuccucguaagacaaaacuucaugcuaaacagaauacuaaaaucaauggacaaaucaauagacacacucucagaaauaucaggagcagcagaacuagaccgaacagaagaauacgcacuaggaguaguaggaguacuagaauccuacauaggaucaauaaacaacauaacaaaacaaucagcaugcguagcaaugucaaaacuacuaacagaauuaaacucagacgacauaaaaaaacuaagagacaacgaagaaccaaacucaccaaaaauaagaguauacaacaccguaauaucauacauagaaucaaacagaaaaaacaacaaacaaacaauacaccuacuaaaaagacuaccagcagacguccuaaaaaaaacaauaaaaaacacacucgacauacacaaaucaauaaccauaaacaacccaaaagaaucaacaguaaacgacaccaacgaccacgcaaaaaacaaugacacaacauaaggacuaguggaagcauuuuccuggcugauuaaaagaaauuacucagcuauggucaucuguuccuguuagaaggcuaugcagcauauuauauacuaugcgcauguuaugaaaugcauaauaaaaaauuuuaaaaaaucuaaaagaucuaaaaaaaaaaaaaaaaaaaaaaaaaaaaaaaaaaaaaaaaaaaaaaaaaaaaaaaaaaaaaaaaugcaucccccccccccccccccccccccccccccccaaaggcucuuuucagagccaccagaauu

SEQ ID NO: 21071 - RNA, 956 nt, Artificial Sequence
  mRNA product Design c-4 comprising derived and/or modified sequence from HRSV(Memphis-37)__AIY60641.1__M2-1 (opt11)
gggagaguccgcucagccagguugcagaagcggcuuagcguguguccuaaucuucucucugcguguagguaggccugugccgcaaacaagcuuaccaugucccgacgcaaccccugcaaauucgaaauccgaggccacugccucaacggcaaacgcugccacuucucccacaacuacuucgaauggcccccccacgcccuccucguacgccaaaacuucaugcucaaccgaauccucaagucaauggacaaauccaucgacacccucuccgaaaucuccggcgccgccgaacucgaccgcaccgaagaauacgcccucggcgucgucggcguccucgaauccuacaucggcuccaucaacaacaucaccaaacaauccgccugcgucgccauguccaaacuccucaccgaacucaacuccgacgacaucaaaaaacuccgcgacaacgaagaacccaacucccccaaaauccgcgucuacaacaccguuaucuccuacaucgaauccaaccgaaaaaacaacaaacaaaccauccaccuccucaaacgacuccccgccgacguccucaaaaaaaccaucaaaaauacccuagacauccacaaauccaucaccaucaacaaccccaaagaauccaccgucaacgacaccaacgaccacgccaaaaacaacgacaccaccuaaggacuaguggaagcauuuuccuggcugauuaaaagaaauuacucagcuauggucaucuguuccuguuagaaggcuaugcagcauauuauauacuaugcgcauguuaugaaaugcauaauaaaaaauuuuaaaaaaucuaaaagaucuaaaaaaaaaaaaaaaaaaaaaaaaaaaaaaaaaaaaaaaaaaaaaaaaaaaaaaaaaaaaaaaaugcaucccccccccccccccccccccccccccccccaaaggcucuuuucagagccaccagaauu

SEQ ID NO: 21072 - RNA, 874 nt, Artificial Sequence
  mRNA product Design c-5 comprising derived and/or modified sequence from HRSV(Memphis-37)__AIY60641.1__M2-1 (wt)
gggagagcggcucggccauuuugucccagucaguccggaggcugcggcugcagaaguaccgccugcggaguaacugcaaagaagcuuaccaugucacgaaggaauccuugcaaauuugaaauucgaggucauugcuugaaugguaagaggugucauuuuagucauaauuauuuugaauggccaccccaugcacugcuuguaagacaaaacuuuauguuaaacagaauacuuaagucuauggauaaaagcauagauacuuuaucagaaauaaguggagcugcagaguuggacagaacugaagaguaugcccucgguguaguuggagugcuagagaguuauauaggaucaauaaauaauauaacuaaacaaucagcauguguugccaugagcaaacuccucacugaacucaacagugaugacaucaaaaaacuaagagauaaugaagagccaaauucaccuaagauaagaguguacaauacugucauaucauauauugaaagcaacaggaaaaacaauaaacaaacuauccaucuguuaaaaagauugccagcagacguauugaagaaaaccaucaaaaacacauuggauauccacaagagcauaaccaucaacaacccaaaagaaucaacuguuaaugauacaaaugaccaugccaaaaauaaugauacuaccugaggacuagucccuguucccagagcccacuuuuuuuucuuuuuuugaaauaaaauagccugucuuucagaucuaaaaaaaaaaaaaaaaaaaaaaaaaaaaaaaaaaaaaaaaaaaaaaaaaaaaaaaaaaaaaaaaugcaucccccccccccccccccccccccccccccccaaaggcucuuuucagagccaccagaauu

SEQ ID NO: 21073 - RNA, 874 nt, Artificial Sequence
  mRNA product Design c-5 comprising derived and/or modified sequence from HRSV(Memphis-37)__AIY60641.1__M2-1 (opt1)
gggagagcggcucggccauuuugucccagucaguccggaggcugcggcugcagaaguaccgccugcggaguaacugcaaagaagcuuaccaugagccgccggaaccccugcaaguucgagauccgcggccacugccugaacgggaagcggugccacuucucccacaacuacuucgaguggccgccccacgcccuccuggugcgccagaacuucaugcugaaccggauccucaagagcauggacaaguccaucgacacccugagcgagaucuccggcgccgcggagcuggaccgcaccgaggaguacgcccucggggucgugggcgugcuggagagcuacaucggguccaucaacaacaucacgaagcagagcgccugcgucgccauguccaagcugcucaccgagcugaacagcgacgacaucaagaagcugcgggacaacgaggagcccaacucccccaagauccgcguguacaacaccgugaucagcuacaucgaguccaaccggaagaacaacaagcagaccauccaccuccugaagcgccugccggccgacguccucaagaagacgaucaagaacacccuggacauccacaagagcaucaccaucaacaaccccaaggaguccaccgugaacgacacgaacgaccacgcgaagaacaacgacaccaccugaggacuagucccuguucccagagcccacuuuuuuuucuuuuuuugaaauaaaauagccugucuuucagaucuaaaaaaaaaaaaaaaaaaaaaaaaaaaaaaaaaaaaaaaaaaaaaaaaaaaaaaaaaaaaaaaaugcaucccccccccccccccccccccccccccccccaaaggcucuuuucagagccaccagaauu

SEQ ID NO: 21074 - RNA, 874 nt, Artificial Sequence
  mRNA product Design c-5 comprising derived and/or modified sequence from HRSV(Memphis-37)__AIY60641.1__M2-1 (opt2)
gggagagcggcucggccauuuugucccagucaguccggaggcugcggcugcagaaguaccgccugcggaguaacugcaaagaagcuuaccaugucccgccgcaaccccugcaaguucgagauccgcggccacugccucaacggcaagcgcugccacuucucccacaacuacuucgaguggcccccccacgcccuccucguccgccagaacuucaugcucaaccgcauccucaaguccauggacaaguccaucgacacccucuccgagaucuccggcgccgccgagcucgaccgcaccgaggaguacgcccucggcgucgucggcguccucgaguccuacaucggcuccaucaacaacaucaccaagcaguccgccugcgucgccauguccaagcuccucaccgagcucaacuccgacgacaucaagaagcuccgcgacaacgaggagcccaacucccccaagauccgcgucuacaacaccgucaucuccuacaucgaguccaaccgcaagaacaacaagcagaccauccaccuccucaagcgccuccccgccgacguccucaagaagaccaucaagaacacccucgacauccacaaguccaucaccaucaacaaccccaaggaguccaccgucaacgacaccaacgaccacgccaagaacaacgacaccaccugaggacuagucccuguucccagagcccacuuuuuuuucuuuuuuugaaauaaaauagccugucuuucagaucuaaaaaaaaaaaaaaaaaaaaaaaaaaaaaaaaaaaaaaaaaaaaaaaaaaaaaaaaaaaaaaaaugcaucccccccccccccccccccccccccccccccaaaggcucuuuucagagccaccagaauu

SEQ ID NO: 21075 - RNA, 874 nt, Artificial Sequence
  mRNA product Design c-5 comprising derived and/or modified sequence from HRSV(Memphis-37)__AIY60641.1__M2-1 (opt3)
gggagagcggcucggccauuuugucccagucaguccggaggcugcggcugcagaaguaccgccugcggaguaacugcaaagaagcuuaccaugagcagaaggaaccccugcaaguucgagauccggggccacugucugaaugggaaacgcugccauuuuucccacaacuacuucgaauggccuccacaugcacuccuugugcgacagaauuuuaugcugaaccguauuuugaagucuauggacaaaucaauagauaccuuaagugagaucagcggagcugcagaacuggacagaacagaggaauaugcccuaggugucguuggcgugcucgaguccuacauugggucuaucaauaacauuacuaagcaaucggcguguguagcuaugucaaaacugcuuacggagcugaauagcgaugacaucaagaaguugagggauaacgaggaaccgaauagucccaaaauacggguguauaacaccgucaucuccuacauugaaucuaaucgcaagaacaauaaacagacaauccaccuccugaagagacugccugccgacgugcucaaaaagacuauuaagaacaccuuagauauccauaaaagcauaacaauuaauaacccaaaggaguccaccguuaacgacacuaaugaucacgccaaaaacaaugacacaaccugaggacuagucccuguucccagagcccacuuuuuuuucuuuuuuugaaauaaaauagccugucuuucagaucuaaaaaaaaaaaaaaaaaaaaaaaaaaaaaaaaaaaaaaaaaaaaaaaaaaaaaaaaaaaaaaaaugcaucccccccccccccccccccccccccccccccaaaggcucuuuucagagccaccagaauu

SEQ ID NO: 21076 - RNA, 874 nt, Artificial Sequence
  mRNA product Design c-5 comprising derived and/or modified sequence from HRSV(Memphis-37)__AIY60641.1__M2-1 (opt4)
gggagagcggcucggccauuuugucccagucaguccggaggcugcggcugcagaaguaccgccugcggaguaacugcaaagaagcuuaccaugagcagaagaaaccccugcaaguucgagaucagaggccacugccugaacggcaagagaugccacuucagccacaacuacuucgaguggcccccccacgcccugcuggugagacagaacuucaugcugaacagaauccugaagagcauggacaagagcaucgacacccugagcgagaucagcggcgccgccgagcuggacagaaccgaggaguacgcccugggcguggugggcgugcuggagagcuacaucggcagcaucaacaacaucaccaagcagagcgccugcguggccaugagcaagcugcugaccgagcugaacagcgacgacaucaagaagcugagagacaacgaggagcccaacagccccaagaucagaguguacaacaccgugaucagcuacaucgagagcaacagaaagaacaacaagcagaccauccaccugcugaagagacugcccgccgacgugcugaagaagaccaucaagaacacccuggacauccacaagagcaucaccaucaacaaccccaaggagagcaccgugaacgacaccaacgaccacgccaagaacaacgacaccaccugaggacuagucccuguucccagagcccacuuuuuuuucuuuuuuugaaauaaaauagccugucuuucagaucuaaaaaaaaaaaaaaaaaaaaaaaaaaaaaaaaaaaaaaaaaaaaaaaaaaaaaaaaaaaaaaaaugcaucccccccccccccccccccccccccccccccaaaggcucuuuucagagccaccagaauu

SEQ ID NO: 21077 - RNA, 874 nt, Artificial Sequence
  mRNA product Design c-5 comprising derived and/or modified sequence from HRSV(Memphis-37)__AIY60641.1__M2-1 (opt5)
gggagagcggcucggccauuuugucccagucaguccggaggcugcggcugcagaaguaccgccugcggaguaacugcaaagaagcuuaccaugagcagacggaaccccugcaaguucgagauccgcggccacugucugaaugggaaaagaugccauuuuucccacaacuacuucgaauggccuccgcaugcccuccuggugcggcagaauuuuaugcuuaaccgcauucugaagucuauggacaaaagcaucgauacccucuccgagauuucuggagcugccgaacuggacagaacagaggaauaugcgcuuggcgucguuggggugcuggagagcuacaucggauccauuaauaacaucacgaagcaaucugcuuguguggccaugagcaaacuccugaccgagcucaauuccgaugacaucaagaagcugcgggauaacgaggaacccaauagcccuaaaauucgcgucuauaacacagugaucucuuacauugaauccaauagaaagaacaauaaacagaccauccaucugcuuaagcggcugcccgccgacguucucaaaaagacaauuaagaacacccuggauauccacaaaagcauuacaaucaauaacccuaaggagucuaccgugaacgacacgaaugaucacgcuaaaaacaaugacaccacaugaggacuagucccuguucccagagcccacuuuuuuuucuuuuuuugaaauaaaauagccugucuuucagaucuaaaaaaaaaaaaaaaaaaaaaaaaaaaaaaaaaaaaaaaaaaaaaaaaaaaaaaaaaaaaaaaaugcaucccccccccccccccccccccccccccccccaaaggcucuuuucagagccaccagaauu

SEQ ID NO: 21078 - RNA, 874 nt, Artificial Sequence
  mRNA product Design c-5 comprising derived and/or modified sequence from HRSV(Memphis-37)__AIY60641.1__M2-1 (opt6)
gggagagcggcucggccauuuugucccagucaguccggaggcugcggcugcagaaguaccgccugcggaguaacugcaaagaagcuuaccauguccagacgaaacccaugcaaauucgaaauaagaggacacugccuaaacggaaaaagaugccacuucucacacaacuacuucgaauggccaccacacgcacuccucguaagacaaaacuucaugcuaaacagaauacuaaaaucaauggacaaaucaauagacacacucucagaaauaucaggagcagcagaacuagaccgaacagaagaauacgcacuaggaguaguaggaguacuagaauccuacauaggaucaauaaacaacauaacaaaacaaucagcaugcguagcaaugucaaaacuacuaacagaauuaaacucagacgacauaaaaaaacuaagagacaacgaagaaccaaacucaccaaaaauaagaguauacaacaccguaauaucauacauagaaucaaacagaaaaaacaacaaacaaacaauacaccuacuaaaaagacuaccagcagacguccuaaaaaaaacaauaaaaaacacacucgacauacacaaaucaauaaccauaaacaacccaaaagaaucaacaguaaacgacaccaacgaccacgcaaaaaacaaugacacaacauaaggacuagucccuguucccagagcccacuuuuuuuucuuuuuuugaaauaaaauagccugucuuucagaucuaaaaaaaaaaaaaaaaaaaaaaaaaaaaaaaaaaaaaaaaaaaaaaaaaaaaaaaaaaaaaaaaugcaucccccccccccccccccccccccccccccccaaaggcucuuuucagagccaccagaauu

SEQ ID NO: 21079 - RNA, 874 nt, Artificial Sequence
  mRNA product Design c-5 comprising derived and/or modified sequence from HRSV(Memphis-37)__AIY60641.1__M2-1 (opt11)
gggagagcggcucggccauuuugucccagucaguccggaggcugcggcugcagaaguaccgccugcggaguaacugcaaagaagcuuaccaugucccgacgcaaccccugcaaauucgaaauccgaggccacugccucaacggcaaacgcugccacuucucccacaacuacuucgaauggcccccccacgcccuccucguacgccaaaacuucaugcucaaccgaauccucaagucaauggacaaauccaucgacacccucuccgaaaucuccggcgccgccgaacucgaccgcaccgaagaauacgcccucggcgucgucggcguccucgaauccuacaucggcuccaucaacaacaucaccaaacaauccgccugcgucgccauguccaaacuccucaccgaacucaacuccgacgacaucaaaaaacuccgcgacaacgaagaacccaacucccccaaaauccgcgucuacaacaccguuaucuccuacaucgaauccaaccgaaaaaacaacaaacaaaccauccaccuccucaaacgacuccccgccgacguccucaaaaaaaccaucaaaaauacccuagacauccacaaauccaucaccaucaacaaccccaaagaauccaccgucaacgacaccaacgaccacgccaaaaacaacgacaccaccuaaggacuagucccuguucccagagcccacuuuuuuuucuuuuuuugaaauaaaauagccugucuuucagaucuaaaaaaaaaaaaaaaaaaaaaaaaaaaaaaaaaaaaaaaaaaaaaaaaaaaaaaaaaaaaaaaaugcaucccccccccccccccccccccccccccccccaaaggcucuuuucagagccaccagaauu

SEQ ID NO: 21080 - RNA, 883 nt, Artificial Sequence
  mRNA product Design d-1 comprising derived and/or modified sequence from HRSV(Memphis-37)__AIY60641.1__M2-1 (wt)
gggagacccgugacccggaaguuguacggcuacgcgacuuucccucccacaaacccucgcgcccuuccuuuccuacuugggcccggcagaaagcuuaccaugucacgaaggaauccuugcaaauuugaaauucgaggucauugcuugaaugguaagaggugucauuuuagucauaauuauuuugaauggccaccccaugcacugcuuguaagacaaaacuuuauguuaaacagaauacuuaagucuauggauaaaagcauagauacuuuaucagaaauaaguggagcugcagaguuggacagaacugaagaguaugcccucgguguaguuggagugcuagagaguuauauaggaucaauaaauaauauaacuaaacaaucagcauguguugccaugagcaaacuccucacugaacucaacagugaugacaucaaaaaacuaagagauaaugaagagccaaauucaccuaagauaagaguguacaauacugucauaucauauauugaaagcaacaggaaaaacaauaaacaaacuauccaucuguuaaaaagauugccagcagacguauugaagaaaaccaucaaaaacacauuggauauccacaagagcauaaccaucaacaacccaaaagaaucaacuguuaaugauacaaaugaccaugccaaaaauaaugauacuaccugaggacuagucccuguucccagagcccacuuuuuuuucuuuuuuugaaauaaaauagccugucuuucagaucuaaaaaaaaaaaaaaaaaaaaaaaaaaaaaaaaaaaaaaaaaaaaaaaaaaaaaaaaaaaaaaaaugcaucccccccccccccccccccccccccccccccaaaggcucuuuucagagccaccagaauu

SEQ ID NO: 21081 - RNA, 883 nt, Artificial Sequence
  mRNA product Design d-1 comprising derived and/or modified sequence from HRSV(Memphis-37)__AIY60641.1__M2-1 (opt1)
gggagacccgugacccggaaguuguacggcuacgcgacuuucccucccacaaacccucgcgcccuuccuuuccuacuugggcccggcagaaagcuuaccaugagccgccggaaccccugcaaguucgagauccgcggccacugccugaacgggaagcggugccacuucucccacaacuacuucgaguggccgccccacgcccuccuggugcgccagaacuucaugcugaaccggauccucaagagcauggacaaguccaucgacacccugagcgagaucuccggcgccgcggagcuggaccgcaccgaggaguacgcccucggggucgugggcgugcuggagagcuacaucggguccaucaacaacaucacgaagcagagcgccugcgucgccauguccaagcugcucaccgagcugaacagcgacgacaucaagaagcugcgggacaacgaggagcccaacucccccaagauccgcguguacaacaccgugaucagcuacaucgaguccaaccggaagaacaacaagcagaccauccaccuccugaagcgccugccggccgacguccucaagaagacgaucaagaacacccuggacauccacaagagcaucaccaucaacaaccccaaggaguccaccgugaacgacacgaacgaccacgcgaagaacaacgacaccaccugaggacuagucccuguucccagagcccacuuuuuuuucuuuuuuugaaauaaaauagccugucuuucagaucuaaaaaaaaaaaaaaaaaaaaaaaaaaaaaaaaaaaaaaaaaaaaaaaaaaaaaaaaaaaaaaaaugcaucccccccccccccccccccccccccccccccaaaggcucuuuucagagccaccagaauu

SEQ ID NO: 21082 - RNA, 883 nt, Artificial Sequence
  mRNA product Design d-1 comprising derived and/or modified sequence from HRSV(Memphis-37)__AIY60641.1__M2-1 (opt2)
gggagacccgugacccggaaguuguacggcuacgcgacuuucccucccacaaacccucgcgcccuuccuuuccuacuugggcccggcagaaagcuuaccaugucccgccgcaaccccugcaaguucgagauccgcggccacugccucaacggcaagcgcugccacuucucccacaacuacuucgaguggcccccccacgcccuccucguccgccagaacuucaugcucaaccgcauccucaaguccauggacaaguccaucgacacccucuccgagaucuccggcgccgccgagcucgaccgcaccgaggaguacgcccucggcgucgucggcguccucgaguccuacaucggcuccaucaacaacaucaccaagcaguccgccugcgucgccauguccaagcuccucaccgagcucaacuccgacgacaucaagaagcuccgcgacaacgaggagcccaacucccccaagauccgcgucuacaacaccgucaucuccuacaucgaguccaaccgcaagaacaacaagcagaccauccaccuccucaagcgccuccccgccgacguccucaagaagaccaucaagaacacccucgacauccacaaguccaucaccaucaacaaccccaaggaguccaccgucaacgacaccaacgaccacgccaagaacaacgacaccaccugaggacuagucccuguucccagagcccacuuuuuuuucuuuuuuugaaauaaaauagccugucuuucagaucuaaaaaaaaaaaaaaaaaaaaaaaaaaaaaaaaaaaaaaaaaaaaaaaaaaaaaaaaaaaaaaaaugcaucccccccccccccccccccccccccccccccaaaggcucuuuucagagccaccagaauu

SEQ ID NO: 21083 - RNA, 883 nt, Artificial Sequence
  mRNA product Design d-1 comprising derived and/or modified sequence from HRSV(Memphis-37)__AIY60641.1__M2-1 (opt3)
gggagacccgugacccggaaguuguacggcuacgcgacuuucccucccacaaacccucgcgcccuuccuuuccuacuugggcccggcagaaagcuuaccaugagcagaaggaaccccugcaaguucgagauccggggccacugucugaaugggaaacgcugccauuuuucccacaacuacuucgaauggccuccacaugcacuccuugugcgacagaauuuuaugcugaaccguauuuugaagucuauggacaaaucaauagauaccuuaagugagaucagcggagcugcagaacuggacagaacagaggaauaugcccuaggugucguuggcgugcucgaguccuacauugggucuaucaauaacauuacuaagcaaucggcguguguagcuaugucaaaacugcuuacggagcugaauagcgaugacaucaagaaguugagggauaacgaggaaccgaauagucccaaaauacggguguauaacaccgucaucuccuacauugaaucuaaucgcaagaacaauaaacagacaauccaccuccugaagagacugccugccgacgugcucaaaaagacuauuaagaacaccuuagauauccauaaaagcauaacaauuaauaacccaaaggaguccaccguuaacgacacuaaugaucacgccaaaaacaaugacacaaccugaggacuagucccuguucccagagcccacuuuuuuuucuuuuuuugaaauaaaauagccugucuuucagaucuaaaaaaaaaaaaaaaaaaaaaaaaaaaaaaaaaaaaaaaaaaaaaaaaaaaaaaaaaaaaaaaaugcaucccccccccccccccccccccccccccccccaaaggcucuuuucagagccaccagaauu

SEQ ID NO: 21084 - RNA, 883 nt, Artificial Sequence
  mRNA product Design d-1 comprising derived and/or modified sequence from HRSV(Memphis-37)__AIY60641.1__M2-1 (opt4)
gggagacccgugacccggaaguuguacggcuacgcgacuuucccucccacaaacccucgcgcccuuccuuuccuacuugggcccggcagaaagcuuaccaugagcagaagaaaccccugcaaguucgagaucagaggccacugccugaacggcaagagaugccacuucagccacaacuacuucgaguggcccccccacgcccugcuggugagacagaacuucaugcugaacagaauccugaagagcauggacaagagcaucgacacccugagcgagaucagcggcgccgccgagcuggacagaaccgaggaguacgcccugggcguggugggcgugcuggagagcuacaucggcagcaucaacaacaucaccaagcagagcgccugcguggccaugagcaagcugcugaccgagcugaacagcgacgacaucaagaagcugagagacaacgaggagcccaacagccccaagaucagaguguacaacaccgugaucagcuacaucgagagcaacagaaagaacaacaagcagaccauccaccugcugaagagacugcccgccgacgugcugaagaagaccaucaagaacacccuggacauccacaagagcaucaccaucaacaaccccaaggagagcaccgugaacgacaccaacgaccacgccaagaacaacgacaccaccugaggacuagucccuguucccagagcccacuuuuuuuucuuuuuuugaaauaaaauagccugucuuucagaucuaaaaaaaaaaaaaaaaaaaaaaaaaaaaaaaaaaaaaaaaaaaaaaaaaaaaaaaaaaaaaaaaugcaucccccccccccccccccccccccccccccccaaaggcucuuuucagagccaccagaauu

SEQ ID NO: 21085 - RNA, 883 nt, Artificial Sequence
  mRNA product Design d-1 comprising derived and/or modified sequence from HRSV(Memphis-37)__AIY60641.1__M2-1 (opt5)
gggagacccgugacccggaaguuguacggcuacgcgacuuucccucccacaaacccucgcgcccuuccuuuccuacuugggcccggcagaaagcuuaccaugagcagacggaaccccugcaaguucgagauccgcggccacugucugaaugggaaaagaugccauuuuucccacaacuacuucgaauggccuccgcaugcccuccuggugcggcagaauuuuaugcuuaaccgcauucugaagucuauggacaaaagcaucgauacccucuccgagauuucuggagcugccgaacuggacagaacagaggaauaugcgcuuggcgucguuggggugcuggagagcuacaucggauccauuaauaacaucacgaagcaaucugcuuguguggccaugagcaaacuccugaccgagcucaauuccgaugacaucaagaagcugcgggauaacgaggaacccaauagcccuaaaauucgcgucuauaacacagugaucucuuacauugaauccaauagaaagaacaauaaacagaccauccaucugcuuaagcggcugcccgccgacguucucaaaaagacaauuaagaacacccuggauauccacaaaagcauuacaaucaauaacccuaaggagucuaccgugaacgacacgaaugaucacgcuaaaaacaaugacaccacaugaggacuagucccuguucccagagcccacuuuuuuuucuuuuuuugaaauaaaauagccugucuuucagaucuaaaaaaaaaaaaaaaaaaaaaaaaaaaaaaaaaaaaaaaaaaaaaaaaaaaaaaaaaaaaaaaaugcaucccccccccccccccccccccccccccccccaaaggcucuuuucagagccaccagaauu

SEQ ID NO: 21086 - RNA, 883 nt, Artificial Sequence
  mRNA product Design d-1 comprising derived and/or modified sequence from HRSV(Memphis-37)__AIY60641.1__M2-1 (opt6)
gggagacccgugacccggaaguuguacggcuacgcgacuuucccucccacaaacccucgcgcccuuccuuuccuacuugggcccggcagaaagcuuaccauguccagacgaaacccaugcaaauucgaaauaagaggacacugccuaaacggaaaaagaugccacuucucacacaacuacuucgaauggccaccacacgcacuccucguaagacaaaacuucaugcuaaacagaauacuaaaaucaauggacaaaucaauagacacacucucagaaauaucaggagcagcagaacuagaccgaacagaagaauacgcacuaggaguaguaggaguacuagaauccuacauaggaucaauaaacaacauaacaaaacaaucagcaugcguagcaaugucaaaacuacuaacagaauuaaacucagacgacauaaaaaaacuaagagacaacgaagaaccaaacucaccaaaaauaagaguauacaacaccguaauaucauacauagaaucaaacagaaaaaacaacaaacaaacaauacaccuacuaaaaagacuaccagcagacguccuaaaaaaaacaauaaaaaacacacucgacauacacaaaucaauaaccauaaacaacccaaaagaaucaacaguaaacgacaccaacgaccacgcaaaaaacaaugacacaacauaaggacuagucccuguucccagagcccacuuuuuuuucuuuuuuugaaauaaaauagccugucuuucagaucuaaaaaaaaaaaaaaaaaaaaaaaaaaaaaaaaaaaaaaaaaaaaaaaaaaaaaaaaaaaaaaaaugcaucccccccccccccccccccccccccccccccaaaggcucuuuucagagccaccagaauu

SEQ ID NO: 21087 - RNA, 883 nt, Artificial Sequence
  mRNA product Design d-1 comprising derived and/or modified sequence from HRSV(Memphis-37)__AIY60641.1__M2-1 (opt11)
gggagacccgugacccggaaguuguacggcuacgcgacuuucccucccacaaacccucgcgcccuuccuuuccuacuugggcccggcagaaagcuuaccaugucccgacgcaaccccugcaaauucgaaauccgaggccacugccucaacggcaaacgcugccacuucucccacaacuacuucgaauggcccccccacgcccuccucguacgccaaaacuucaugcucaaccgaauccucaagucaauggacaaauccaucgacacccucuccgaaaucuccggcgccgccgaacucgaccgcaccgaagaauacgcccucggcgucgucggcguccucgaauccuacaucggcuccaucaacaacaucaccaaacaauccgccugcgucgccauguccaaacuccucaccgaacucaacuccgacgacaucaaaaaacuccgcgacaacgaagaacccaacucccccaaaauccgcgucuacaacaccguuaucuccuacaucgaauccaaccgaaaaaacaacaaacaaaccauccaccuccucaaacgacuccccgccgacguccucaaaaaaaccaucaaaaauacccuagacauccacaaauccaucaccaucaacaaccccaaagaauccaccgucaacgacaccaacgaccacgccaaaaacaacgacaccaccuaaggacuagucccuguucccagagcccacuuuuuuuucuuuuuuugaaauaaaauagccugucuuucagaucuaaaaaaaaaaaaaaaaaaaaaaaaaaaaaaaaaaaaaaaaaaaaaaaaaaaaaaaaaaaaaaaaugcaucccccccccccccccccccccccccccccccaaaggcucuuuucagagccaccagaauu

SEQ ID NO: 21088 - RNA, 938 nt, Artificial Sequence
  mRNA product Design d-2 comprising derived and/or modified sequence from HRSV(Memphis-37)__AIY60641.1__M2-1 (wt)
gggagagcggcucggccauuuugucccagucaguccggaggcugcggcugcagaaguaccgccugcggaguaacugcaaagaagcuuaccaugucacgaaggaauccuugcaaauuugaaauucgaggucauugcuugaaugguaagaggugucauuuuagucauaauuauuuugaauggccaccccaugcacugcuuguaagacaaaacuuuauguuaaacagaauacuuaagucuauggauaaaagcauagauacuuuaucagaaauaaguggagcugcagaguuggacagaacugaagaguaugcccucgguguaguuggagugcuagagaguuauauaggaucaauaaauaauauaacuaaacaaucagcauguguugccaugagcaaacuccucacugaacucaacagugaugacaucaaaaaacuaagagauaaugaagagccaaauucaccuaagauaagaguguacaauacugucauaucauauauugaaagcaacaggaaaaacaauaaacaaacuauccaucuguuaaaaagauugccagcagacguauugaagaaaaccaucaaaaacacauuggauauccacaagagcauaaccaucaacaacccaaaagaaucaacuguuaaugauacaaaugaccaugccaaaaauaaugauacuaccugaggacuaguaauaaggaaacuguaugaaugucugugggcaggaagugaagagauccuucuguaaagguuuuuggaauuaugucugcugaauaauaaacuuuuuugaaauaauaaaucugguagaaaaaugagaucuaaaaaaaaaaaaaaaaaaaaaaaaaaaaaaaaaaaaaaaaaaaaaaaaaaaaaaaaaaaaaaaaugcaucccccccccccccccccccccccccccccccaaaggcucuuuucagagccaccagaauu

SEQ ID NO: 21089 - RNA, 938 nt, Artificial Sequence
  mRNA product Design d-2 comprising derived and/or modified sequence from HRSV(Memphis-37)__AIY60641.1__M2-1 (opt1)
gggagagcggcucggccauuuugucccagucaguccggaggcugcggcugcagaaguaccgccugcggaguaacugcaaagaagcuuaccaugagccgccggaaccccugcaaguucgagauccgcggccacugccugaacgggaagcggugccacuucucccacaacuacuucgaguggccgccccacgcccuccuggugcgccagaacuucaugcugaaccggauccucaagagcauggacaaguccaucgacacccugagcgagaucuccggcgccgcggagcuggaccgcaccgaggaguacgcccucggggucgugggcgugcuggagagcuacaucggguccaucaacaacaucacgaagcagagcgccugcgucgccauguccaagcugcucaccgagcugaacagcgacgacaucaagaagcugcgggacaacgaggagcccaacucccccaagauccgcguguacaacaccgugaucagcuacaucgaguccaaccggaagaacaacaagcagaccauccaccuccugaagcgccugccggccgacguccucaagaagacgaucaagaacacccuggacauccacaagagcaucaccaucaacaaccccaaggaguccaccgugaacgacacgaacgaccacgcgaagaacaacgacaccaccugaggacuaguaauaaggaaacuguaugaaugucugugggcaggaagugaagagauccuucuguaaagguuuuuggaauuaugucugcugaauaauaaacuuuuuugaaauaauaaaucugguagaaaaaugagaucuaaaaaaaaaaaaaaaaaaaaaaaaaaaaaaaaaaaaaaaaaaaaaaaaaaaaaaaaaaaaaaaaugcaucccccccccccccccccccccccccccccccaaaggcucuuuucagagccaccagaauu

SEQ ID NO: 21090 - RNA, 938 nt, Artificial Sequence
  mRNA product Design d-2 comprising derived and/or modified sequence from HRSV(Memphis-37)__AIY60641.1__M2-1 (opt2)
gggagagcggcucggccauuuugucccagucaguccggaggcugcggcugcagaaguaccgccugcggaguaacugcaaagaagcuuaccaugucccgccgcaaccccugcaaguucgagauccgcggccacugccucaacggcaagcgcugccacuucucccacaacuacuucgaguggcccccccacgcccuccucguccgccagaacuucaugcucaaccgcauccucaaguccauggacaaguccaucgacacccucuccgagaucuccggcgccgccgagcucgaccgcaccgaggaguacgcccucggcgucgucggcguccucgaguccuacaucggcuccaucaacaacaucaccaagcaguccgccugcgucgccauguccaagcuccucaccgagcucaacuccgacgacaucaagaagcuccgcgacaacgaggagcccaacucccccaagauccgcgucuacaacaccgucaucuccuacaucgaguccaaccgcaagaacaacaagcagaccauccaccuccucaagcgccuccccgccgacguccucaagaagaccaucaagaacacccucgacauccacaaguccaucaccaucaacaaccccaaggaguccaccgucaacgacaccaacgaccacgccaagaacaacgacaccaccugaggacuaguaauaaggaaacuguaugaaugucugugggcaggaagugaagagauccuucuguaaagguuuuuggaauuaugucugcugaauaauaaacuuuuuugaaauaauaaaucugguagaaaaaugagaucuaaaaaaaaaaaaaaaaaaaaaaaaaaaaaaaaaaaaaaaaaaaaaaaaaaaaaaaaaaaaaaaaugcaucccccccccccccccccccccccccccccccaaaggcucuuuucagagccaccagaauu

SEQ ID NO: 21091 - RNA, 938 nt, Artificial Sequence
  mRNA product Design d-2 comprising derived and/or modified sequence from HRSV(Memphis-37)__AIY60641.1__M2-1 (opt3)
gggagagcggcucggccauuuugucccagucaguccggaggcugcggcugcagaaguaccgccugcggaguaacugcaaagaagcuuaccaugagcagaaggaaccccugcaaguucgagauccggggccacugucugaaugggaaacgcugccauuuuucccacaacuacuucgaauggccuccacaugcacuccuugugcgacagaauuuuaugcugaaccguauuuugaagucuauggacaaaucaauagauaccuuaagugagaucagcggagcugcagaacuggacagaacagaggaauaugcccuaggugucguuggcgugcucgaguccuacauugggucuaucaauaacauuacuaagcaaucggcguguguagcuaugucaaaacugcuuacggagcugaauagcgaugacaucaagaaguugagggauaacgaggaaccgaauagucccaaaauacggguguauaacaccgucaucuccuacauugaaucuaaucgcaagaacaauaaacagacaauccaccuccugaagagacugccugccgacgugcucaaaaagacuauuaagaacaccuuagauauccauaaaagcauaacaauuaauaacccaaaggaguccaccguuaacgacacuaaugaucacgccaaaaacaaugacacaaccugaggacuaguaauaaggaaacuguaugaaugucugugggcaggaagugaagagauccuucuguaaagguuuuuggaauuaugucugcugaauaauaaacuuuuuugaaauaauaaaucugguagaaaaaugagaucuaaaaaaaaaaaaaaaaaaaaaaaaaaaaaaaaaaaaaaaaaaaaaaaaaaaaaaaaaaaaaaaaugcaucccccccccccccccccccccccccccccccaaaggcucuuuucagagccaccagaauu

SEQ ID NO: 21092 - RNA, 938 nt, Artificial Sequence
  mRNA product Design d-2 comprising derived and/or modified sequence from HRSV(Memphis-37)__AIY60641.1__M2-1 (opt4)
gggagagcggcucggccauuuugucccagucaguccggaggcugcggcugcagaaguaccgccugcggaguaacugcaaagaagcuuaccaugagcagaagaaaccccugcaaguucgagaucagaggccacugccugaacggcaagagaugccacuucagccacaacuacuucgaguggcccccccacgcccugcuggugagacagaacuucaugcugaacagaauccugaagagcauggacaagagcaucgacacccugagcgagaucagcggcgccgccgagcuggacagaaccgaggaguacgcccugggcguggugggcgugcuggagagcuacaucggcagcaucaacaacaucaccaagcagagcgccugcguggccaugagcaagcugcugaccgagcugaacagcgacgacaucaagaagcugagagacaacgaggagcccaacagccccaagaucagaguguacaacaccgugaucagcuacaucgagagcaacagaaagaacaacaagcagaccauccaccugcugaagagacugcccgccgacgugcugaagaagaccaucaagaacacccuggacauccacaagagcaucaccaucaacaaccccaaggagagcaccgugaacgacaccaacgaccacgccaagaacaacgacaccaccugaggacuaguaauaaggaaacuguaugaaugucugugggcaggaagugaagagauccuucuguaaagguuuuuggaauuaugucugcugaauaauaaacuuuuuugaaauaauaaaucugguagaaaaaugagaucuaaaaaaaaaaaaaaaaaaaaaaaaaaaaaaaaaaaaaaaaaaaaaaaaaaaaaaaaaaaaaaaaugcaucccccccccccccccccccccccccccccccaaaggcucuuuucagagccaccagaauu

SEQ ID NO: 21093 - RNA, 938 nt, Artificial Sequence
  mRNA product Design d-2 comprising derived and/or modified sequence from HRSV(Memphis-37)__AIY60641.1__M2-1 (opt5)
gggagagcggcucggccauuuugucccagucaguccggaggcugcggcugcagaaguaccgccugcggaguaacugcaaagaagcuuaccaugagcagacggaaccccugcaaguucgagauccgcggccacugucugaaugggaaaagaugccauuuuucccacaacuacuucgaauggccuccgcaugcccuccuggugcggcagaauuuuaugcuuaaccgcauucugaagucuauggacaaaagcaucgauacccucuccgagauuucuggagcugccgaacuggacagaacagaggaauaugcgcuuggcgucguuggggugcuggagagcuacaucggauccauuaauaacaucacgaagcaaucugcuuguguggccaugagcaaacuccugaccgagcucaauuccgaugacaucaagaagcugcgggauaacgaggaacccaauagcccuaaaauucgcgucuauaacacagugaucucuuacauugaauccaauagaaagaacaauaaacagaccauccaucugcuuaagcggcugcccgccgacguucucaaaaagacaauuaagaacacccuggauauccacaaaagcauuacaaucaauaacccuaaggagucuaccgugaacgacacgaaugaucacgcuaaaaacaaugacaccacaugaggacuaguaauaaggaaacuguaugaaugucugugggcaggaagugaagagauccuucuguaaagguuuuuggaauuaugucugcugaauaauaaacuuuuuugaaauaauaaaucugguagaaaaaugagaucuaaaaaaaaaaaaaaaaaaaaaaaaaaaaaaaaaaaaaaaaaaaaaaaaaaaaaaaaaaaaaaaaugcaucccccccccccccccccccccccccccccccaaaggcucuuuucagagccaccagaauu

SEQ ID NO: 21094 - RNA, 938 nt, Artificial Sequence
  mRNA product Design d-2 comprising derived and/or modified sequence from HRSV(Memphis-37)__AIY60641.1__M2-1 (opt6)
gggagagcggcucggccauuuugucccagucaguccggaggcugcggcugcagaaguaccgccugcggaguaacugcaaagaagcuuaccauguccagacgaaacccaugcaaauucgaaauaagaggacacugccuaaacggaaaaagaugccacuucucacacaacuacuucgaauggccaccacacgcacuccucguaagacaaaacuucaugcuaaacagaauacuaaaaucaauggacaaaucaauagacacacucucagaaauaucaggagcagcagaacuagaccgaacagaagaauacgcacuaggaguaguaggaguacuagaauccuacauaggaucaauaaacaacauaacaaaacaaucagcaugcguagcaaugucaaaacuacuaacagaauuaaacucagacgacauaaaaaaacuaagagacaacgaagaaccaaacucaccaaaaauaagaguauacaacaccguaauaucauacauagaaucaaacagaaaaaacaacaaacaaacaauacaccuacuaaaaagacuaccagcagacguccuaaaaaaaacaauaaaaaacacacucgacauacacaaaucaauaaccauaaacaacccaaaagaaucaacaguaaacgacaccaacgaccacgcaaaaaacaaugacacaacauaaggacuaguaauaaggaaacuguaugaaugucugugggcaggaagugaagagauccuucuguaaagguuuuuggaauuaugucugcugaauaauaaacuuuuuugaaauaauaaaucugguagaaaaaugagaucuaaaaaaaaaaaaaaaaaaaaaaaaaaaaaaaaaaaaaaaaaaaaaaaaaaaaaaaaaaaaaaaaugcaucccccccccccccccccccccccccccccccaaaggcucuuuucagagccaccagaauu

SEQ ID NO: 21095 - RNA, 938 nt, Artificial Sequence
  mRNA product Design d-2 comprising derived and/or modified sequence from HRSV(Memphis-37)__AIY60641.1__M2-1 (opt11)
gggagagcggcucggccauuuugucccagucaguccggaggcugcggcugcagaaguaccgccugcggaguaacugcaaagaagcuuaccaugucccgacgcaaccccugcaaauucgaaauccgaggccacugccucaacggcaaacgcugccacuucucccacaacuacuucgaauggcccccccacgcccuccucguacgccaaaacuucaugcucaaccgaauccucaagucaauggacaaauccaucgacacccucuccgaaaucuccggcgccgccgaacucgaccgcaccgaagaauacgcccucggcgucgucggcguccucgaauccuacaucggcuccaucaacaacaucaccaaacaauccgccugcgucgccauguccaaacuccucaccgaacucaacuccgacgacaucaaaaaacuccgcgacaacgaagaacccaacucccccaaaauccgcgucuacaacaccguuaucuccuacaucgaauccaaccgaaaaaacaacaaacaaaccauccaccuccucaaacgacuccccgccgacguccucaaaaaaaccaucaaaaauacccuagacauccacaaauccaucaccaucaacaaccccaaagaauccaccgucaacgacaccaacgaccacgccaaaaacaacgacaccaccuaaggacuaguaauaaggaaacuguaugaaugucugugggcaggaagugaagagauccuucuguaaagguuuuuggaauuaugucugcugaauaauaaacuuuuuugaaauaauaaaucugguagaaaaaugagaucuaaaaaaaaaaaaaaaaaaaaaaaaaaaaaaaaaaaaaaaaaaaaaaaaaaaaaaaaaaaaaaaaugcaucccccccccccccccccccccccccccccccaaaggcucuuuucagagccaccagaauu

SEQ ID NO: 21096 - RNA, 1254 nt, Artificial Sequence
  mRNA product Design d-3 comprising derived and/or modified sequence from HRSV(Memphis-37)__AIY60641.1__M2-1 (wt)
gggagagggcgcuuggcuugcaaggacccugagcugcggcauugaagcacacccaacccaacucgacugaagucagccucacugaaccggaucugagaaucuucucucucugggcuugccagggcucuccgaaccuagcuagcauccucuucaauuccaacuagaaagcuuaccaugucacgaaggaauccuugcaaauuugaaauucgaggucauugcuugaaugguaagaggugucauuuuagucauaauuauuuugaauggccaccccaugcacugcuuguaagacaaaacuuuauguuaaacagaauacuuaagucuauggauaaaagcauagauacuuuaucagaaauaaguggagcugcagaguuggacagaacugaagaguaugcccucgguguaguuggagugcuagagaguuauauaggaucaauaaauaauauaacuaaacaaucagcauguguugccaugagcaaacuccucacugaacucaacagugaugacaucaaaaaacuaagagauaaugaagagccaaauucaccuaagauaagaguguacaauacugucauaucauauauugaaagcaacaggaaaaacaauaaacaaacuauccaucuguuaaaaagauugccagcagacguauugaagaaaaccaucaaaaacacauuggauauccacaagagcauaaccaucaacaacccaaaagaaucaacuguuaaugauacaaaugaccaugccaaaaauaaugauacuaccugaggacuagugaagggaacacccaaauuuaauucagccuuaagcacaauuaauuaagagugaaacguaauuguacaagcaguuggucacccaccauagggcaugaucaacaccgcaaccuuuccuuuuucccccagugauucugaaaaaccccucuucccuucagcuugcuuagauguuccaaauuuaguaagcuuaaggcggccuacagaagaaaaagaaaaaaaaggccacaaaaguucccucucacuuucaguaaauaaaauaaaagcagcaacagaaauaaagaaauaaaugaaauucaaaaugaaauaaauauuguguugugcagcauuaaaaaaucaauaaaaauuaaaaaugagcaagaucuaaaaaaaaaaaaaaaaaaaaaaaaaaaaaaaaaaaaaaaaaaaaaaaaaaaaaaaaaaaaaaaaugcaucccccccccccccccccccccccccccccccaaaggcucuuuucagagccaccagaauu

SEQ ID NO: 21097 - RNA, 1254 nt, Artificial Sequence
  mRNA product Design d-3 comprising derived and/or modified sequence from HRSV(Memphis-37)__AIY60641.1__M2-1 (opt1)
gggagagggcgcuuggcuugcaaggacccugagcugcggcauugaagcacacccaacccaacucgacugaagucagccucacugaaccggaucugagaaucuucucucucugggcuugccagggcucuccgaaccuagcuagcauccucuucaauuccaacuagaaagcuuaccaugagccgccggaaccccugcaaguucgagauccgcggccacugccugaacgggaagcggugccacuucucccacaacuacuucgaguggccgccccacgcccuccuggugcgccagaacuucaugcugaaccggauccucaagagcauggacaaguccaucgacacccugagcgagaucuccggcgccgcggagcuggaccgcaccgaggaguacgcccucggggucgugggcgugcuggagagcuacaucggguccaucaacaacaucacgaagcagagcgccugcgucgccauguccaagcugcucaccgagcugaacagcgacgacaucaagaagcugcgggacaacgaggagcccaacucccccaagauccgcguguacaacaccgugaucagcuacaucgaguccaaccggaagaacaacaagcagaccauccaccuccugaagcgccugccggccgacguccucaagaagacgaucaagaacacccuggacauccacaagagcaucaccaucaacaaccccaaggaguccaccgugaacgacacgaacgaccacgcgaagaacaacgacaccaccugaggacuagugaagggaacacccaaauuuaauucagccuuaagcacaauuaauuaagagugaaacguaauuguacaagcaguuggucacccaccauagggcaugaucaacaccgcaaccuuuccuuuuucccccagugauucugaaaaaccccucuucccuucagcuugcuuagauguuccaaauuuaguaagcuuaaggcggccuacagaagaaaaagaaaaaaaaggccacaaaaguucccucucacuuucaguaaauaaaauaaaagcagcaacagaaauaaagaaauaaaugaaauucaaaaugaaauaaauauuguguugugcagcauuaaaaaaucaauaaaaauuaaaaaugagcaagaucuaaaaaaaaaaaaaaaaaaaaaaaaaaaaaaaaaaaaaaaaaaaaaaaaaaaaaaaaaaaaaaaaugcaucccccccccccccccccccccccccccccccaaaggcucuuuucagagccaccagaauu

SEQ ID NO: 21098 - RNA, 1254 nt, Artificial Sequence
  mRNA product Design d-3 comprising derived and/or modified sequence from HRSV(Memphis-37)__AIY60641.1__M2-1 (opt2)
gggagagggcgcuuggcuugcaaggacccugagcugcggcauugaagcacacccaacccaacucgacugaagucagccucacugaaccggaucugagaaucuucucucucugggcuugccagggcucuccgaaccuagcuagcauccucuucaauuccaacuagaaagcuuaccaugucccgccgcaaccccugcaaguucgagauccgcggccacugccucaacggcaagcgcugccacuucucccacaacuacuucgaguggcccccccacgcccuccucguccgccagaacuucaugcucaaccgcauccucaaguccauggacaaguccaucgacacccucuccgagaucuccggcgccgccgagcucgaccgcaccgaggaguacgcccucggcgucgucggcguccucgaguccuacaucggcuccaucaacaacaucaccaagcaguccgccugcgucgccauguccaagcuccucaccgagcucaacuccgacgacaucaagaagcuccgcgacaacgaggagcccaacucccccaagauccgcgucuacaacaccgucaucuccuacaucgaguccaaccgcaagaacaacaagcagaccauccaccuccucaagcgccuccccgccgacguccucaagaagaccaucaagaacacccucgacauccacaaguccaucaccaucaacaaccccaaggaguccaccgucaacgacaccaacgaccacgccaagaacaacgacaccaccugaggacuagugaagggaacacccaaauuuaauucagccuuaagcacaauuaauuaagagugaaacguaauuguacaagcaguuggucacccaccauagggcaugaucaacaccgcaaccuuuccuuuuucccccagugauucugaaaaaccccucuucccuucagcuugcuuagauguuccaaauuuaguaagcuuaaggcggccuacagaagaaaaagaaaaaaaaggccacaaaaguucccucucacuuucaguaaauaaaauaaaagcagcaacagaaauaaagaaauaaaugaaauucaaaaugaaauaaauauuguguugugcagcauuaaaaaaucaauaaaaauuaaaaaugagcaagaucuaaaaaaaaaaaaaaaaaaaaaaaaaaaaaaaaaaaaaaaaaaaaaaaaaaaaaaaaaaaaaaaaugcaucccccccccccccccccccccccccccccccaaaggcucuuuucagagccaccagaauu

SEQ ID NO: 21099 - RNA, 1254 nt, Artificial Sequence
  mRNA product Design d-3 comprising derived and/or modified sequence from HRSV(Memphis-37)__AIY60641.1__M2-1 (opt3)
gggagagggcgcuuggcuugcaaggacccugagcugcggcauugaagcacacccaacccaacucgacugaagucagccucacugaaccggaucugagaaucuucucucucugggcuugccagggcucuccgaaccuagcuagcauccucuucaauuccaacuagaaagcuuaccaugagcagaaggaaccccugcaaguucgagauccggggccacugucugaaugggaaacgcugccauuuuucccacaacuacuucgaauggccuccacaugcacuccuugugcgacagaauuuuaugcugaaccguauuuugaagucuauggacaaaucaauagauaccuuaagugagaucagcggagcugcagaacuggacagaacagaggaauaugcccuaggugucguuggcgugcucgaguccuacauugggucuaucaauaacauuacuaagcaaucggcguguguagcuaugucaaaacugcuuacggagcugaauagcgaugacaucaagaaguugagggauaacgaggaaccgaauagucccaaaauacggguguauaacaccgucaucuccuacauugaaucuaaucgcaagaacaauaaacagacaauccaccuccugaagagacugccugccgacgugcucaaaaagacuauuaagaacaccuuagauauccauaaaagcauaacaauuaauaacccaaaggaguccaccguuaacgacacuaaugaucacgccaaaaacaaugacacaaccugaggacuagugaagggaacacccaaauuuaauucagccuuaagcacaauuaauuaagagugaaacguaauuguacaagcaguuggucacccaccauagggcaugaucaacaccgcaaccuuuccuuuuucccccagugauucugaaaaaccccucuucccuucagcuugcuuagauguuccaaauuuaguaagcuuaaggcggccuacagaagaaaaagaaaaaaaaggccacaaaaguucccucucacuuucaguaaauaaaauaaaagcagcaacagaaauaaagaaauaaaugaaauucaaaaugaaauaaauauuguguugugcagcauuaaaaaaucaauaaaaauuaaaaaugagcaagaucuaaaaaaaaaaaaaaaaaaaaaaaaaaaaaaaaaaaaaaaaaaaaaaaaaaaaaaaaaaaaaaaaugcaucccccccccccccccccccccccccccccccaaaggcucuuuucagagccaccagaauu

SEQ ID NO: 21100 - RNA, 1254 nt, Artificial Sequence
  mRNA product Design d-3 comprising derived and/or modified sequence from HRSV(Memphis-37)__AIY60641.1__M2-1 (opt4)
gggagagggcgcuuggcuugcaaggacccugagcugcggcauugaagcacacccaacccaacucgacugaagucagccucacugaaccggaucugagaaucuucucucucugggcuugccagggcucuccgaaccuagcuagcauccucuucaauuccaacuagaaagcuuaccaugagcagaagaaaccccugcaaguucgagaucagaggccacugccugaacggcaagagaugccacuucagccacaacuacuucgaguggcccccccacgcccugcuggugagacagaacuucaugcugaacagaauccugaagagcauggacaagagcaucgacacccugagcgagaucagcggcgccgccgagcuggacagaaccgaggaguacgcccugggcguggugggcgugcuggagagcuacaucggcagcaucaacaacaucaccaagcagagcgccugcguggccaugagcaagcugcugaccgagcugaacagcgacgacaucaagaagcugagagacaacgaggagcccaacagccccaagaucagaguguacaacaccgugaucagcuacaucgagagcaacagaaagaacaacaagcagaccauccaccugcugaagagacugcccgccgacgugcugaagaagaccaucaagaacacccuggacauccacaagagcaucaccaucaacaaccccaaggagagcaccgugaacgacaccaacgaccacgccaagaacaacgacaccaccugaggacuagugaagggaacacccaaauuuaauucagccuuaagcacaauuaauuaagagugaaacguaauuguacaagcaguuggucacccaccauagggcaugaucaacaccgcaaccuuuccuuuuucccccagugauucugaaaaaccccucuucccuucagcuugcuuagauguuccaaauuuaguaagcuuaaggcggccuacagaagaaaaagaaaaaaaaggccacaaaaguucccucucacuuucaguaaauaaaauaaaagcagcaacagaaauaaagaaauaaaugaaauucaaaaugaaauaaauauuguguugugcagcauuaaaaaaucaauaaaaauuaaaaaugagcaagaucuaaaaaaaaaaaaaaaaaaaaaaaaaaaaaaaaaaaaaaaaaaaaaaaaaaaaaaaaaaaaaaaaugcaucccccccccccccccccccccccccccccccaaaggcucuuuucagagccaccagaauu

SEQ ID NO: 21101 - RNA, 1254 nt, Artificial Sequence
  mRNA product Design d-3 comprising derived and/or modified sequence from HRSV(Memphis-37)__AIY60641.1__M2-1 (opt5)
gggagagggcgcuuggcuugcaaggacccugagcugcggcauugaagcacacccaacccaacucgacugaagucagccucacugaaccggaucugagaaucuucucucucugggcuugccagggcucuccgaaccuagcuagcauccucuucaauuccaacuagaaagcuuaccaugagcagacggaaccccugcaaguucgagauccgcggccacugucugaaugggaaaagaugccauuuuucccacaacuacuucgaauggccuccgcaugcccuccuggugcggcagaauuuuaugcuuaaccgcauucugaagucuauggacaaaagcaucgauacccucuccgagauuucuggagcugccgaacuggacagaacagaggaauaugcgcuuggcgucguuggggugcuggagagcuacaucggauccauuaauaacaucacgaagcaaucugcuuguguggccaugagcaaacuccugaccgagcucaauuccgaugacaucaagaagcugcgggauaacgaggaacccaauagcccuaaaauucgcgucuauaacacagugaucucuuacauugaauccaauagaaagaacaauaaacagaccauccaucugcuuaagcggcugcccgccgacguucucaaaaagacaauuaagaacacccuggauauccacaaaagcauuacaaucaauaacccuaaggagucuaccgugaacgacacgaaugaucacgcuaaaaacaaugacaccacaugaggacuagugaagggaacacccaaauuuaauucagccuuaagcacaauuaauuaagagugaaacguaauuguacaagcaguuggucacccaccauagggcaugaucaacaccgcaaccuuuccuuuuucccccagugauucugaaaaaccccucuucccuucagcuugcuuagauguuccaaauuuaguaagcuuaaggcggccuacagaagaaaaagaaaaaaaaggccacaaaaguucccucucacuuucaguaaauaaaauaaaagcagcaacagaaauaaagaaauaaaugaaauucaaaaugaaauaaauauuguguugugcagcauuaaaaaaucaauaaaaauuaaaaaugagcaagaucuaaaaaaaaaaaaaaaaaaaaaaaaaaaaaaaaaaaaaaaaaaaaaaaaaaaaaaaaaaaaaaaaugcaucccccccccccccccccccccccccccccccaaaggcucuuuucagagccaccagaauu

SEQ ID NO: 21102 - RNA, 1254 nt, Artificial Sequence
  mRNA product Design d-3 comprising derived and/or modified sequence from HRSV(Memphis-37)__AIY60641.1__M2-1 (opt6)
gggagagggcgcuuggcuugcaaggacccugagcugcggcauugaagcacacccaacccaacucgacugaagucagccucacugaaccggaucugagaaucuucucucucugggcuugccagggcucuccgaaccuagcuagcauccucuucaauuccaacuagaaagcuuaccauguccagacgaaacccaugcaaauucgaaauaagaggacacugccuaaacggaaaaagaugccacuucucacacaacuacuucgaauggccaccacacgcacuccucguaagacaaaacuucaugcuaaacagaauacuaaaaucaauggacaaaucaauagacacacucucagaaauaucaggagcagcagaacuagaccgaacagaagaauacgcacuaggaguaguaggaguacuagaauccuacauaggaucaauaaacaacauaacaaaacaaucagcaugcguagcaaugucaaaacuacuaacagaauuaaacucagacgacauaaaaaaacuaagagacaacgaagaaccaaacucaccaaaaauaagaguauacaacaccguaauaucauacauagaaucaaacagaaaaaacaacaaacaaacaauacaccuacuaaaaagacuaccagcagacguccuaaaaaaaacaauaaaaaacacacucgacauacacaaaucaauaaccauaaacaacccaaaagaaucaacaguaaacgacaccaacgaccacgcaaaaaacaaugacacaacauaaggacuagugaagggaacacccaaauuuaauucagccuuaagcacaauuaauuaagagugaaacguaauuguacaagcaguuggucacccaccauagggcaugaucaacaccgcaaccuuuccuuuuucccccagugauucugaaaaaccccucuucccuucagcuugcuuagauguuccaaauuuaguaagcuuaaggcggccuacagaagaaaaagaaaaaaaaggccacaaaaguucccucucacuuucaguaaauaaaauaaaagcagcaacagaaauaaagaaauaaaugaaauucaaaaugaaauaaauauuguguugugcagcauuaaaaaaucaauaaaaauuaaaaaugagcaagaucuaaaaaaaaaaaaaaaaaaaaaaaaaaaaaaaaaaaaaaaaaaaaaaaaaaaaaaaaaaaaaaaaugcaucccccccccccccccccccccccccccccccaaaggcucuuuucagagccaccagaauu

SEQ ID NO: 21103 - RNA, 1254 nt, Artificial Sequence
  mRNA product Design d-3 comprising derived and/or modified sequence from HRSV(Memphis-37)__AIY60641.1__M2-1 (opt11)
gggagagggcgcuuggcuugcaaggacccugagcugcggcauugaagcacacccaacccaacucgacugaagucagccucacugaaccggaucugagaaucuucucucucugggcuugccagggcucuccgaaccuagcuagcauccucuucaauuccaacuagaaagcuuaccaugucccgacgcaaccccugcaaauucgaaauccgaggccacugccucaacggcaaacgcugccacuucucccacaacuacuucgaauggcccccccacgcccuccucguacgccaaaacuucaugcucaaccgaauccucaagucaauggacaaauccaucgacacccucuccgaaaucuccggcgccgccgaacucgaccgcaccgaagaauacgcccucggcgucgucggcguccucgaauccuacaucggcuccaucaacaacaucaccaaacaauccgccugcgucgccauguccaaacuccucaccgaacucaacuccgacgacaucaaaaaacuccgcgacaacgaagaacccaacucccccaaaauccgcgucuacaacaccguuaucuccuacaucgaauccaaccgaaaaaacaacaaacaaaccauccaccuccucaaacgacuccccgccgacguccucaaaaaaaccaucaaaaauacccuagacauccacaaauccaucaccaucaacaaccccaaagaauccaccgucaacgacaccaacgaccacgccaaaaacaacgacaccaccuaaggacuagugaagggaacacccaaauuuaauucagccuuaagcacaauuaauuaagagugaaacguaauuguacaagcaguuggucacccaccauagggcaugaucaacaccgcaaccuuuccuuuuucccccagugauucugaaaaaccccucuucccuucagcuugcuuagauguuccaaauuuaguaagcuuaaggcggccuacagaagaaaaagaaaaaaaaggccacaaaaguucccucucacuuucaguaaauaaaauaaaagcagcaacagaaauaaagaaauaaaugaaauucaaaaugaaauaaauauuguguugugcagcauuaaaaaaucaauaaaaauuaaaaaugagcaagaucuaaaaaaaaaaaaaaaaaaaaaaaaaaaaaaaaaaaaaaaaaaaaaaaaaaaaaaaaaaaaaaaaugcaucccccccccccccccccccccccccccccccaaaggcucuuuucagagccaccagaauu

SEQ ID NO: 21104 - RNA, 937 nt, Artificial Sequence
  mRNA product Design d-4 comprising derived and/or modified sequence from HRSV(Memphis-37)__AIY60641.1__M2-1 (wt)
gggagagucccgcagucggcguccagcggcucugcuuguucgugugugugucguugcaggccuuauucaagcuuaccaugucacgaaggaauccuugcaaauuugaaauucgaggucauugcuugaaugguaagaggugucauuuuagucauaauuauuuugaauggccaccccaugcacugcuuguaagacaaaacuuuauguuaaacagaauacuuaagucuauggauaaaagcauagauacuuuaucagaaauaaguggagcugcagaguuggacagaacugaagaguaugcccucgguguaguuggagugcuagagaguuauauaggaucaauaaauaauauaacuaaacaaucagcauguguugccaugagcaaacuccucacugaacucaacagugaugacaucaaaaaacuaagagauaaugaagagccaaauucaccuaagauaagaguguacaauacugucauaucauauauugaaagcaacaggaaaaacaauaaacaaacuauccaucuguuaaaaagauugccagcagacguauugaagaaaaccaucaaaaacacauuggauauccacaagagcauaaccaucaacaacccaaaagaaucaacuguuaaugauacaaaugaccaugccaaaaauaaugauacuaccugaggacuaguggaagcauuuuccuggcugauuaaaagaaauuacucagcuauggucaucuguuccuguuagaaggcuaugcagcauauuauauacuaugcgcauguuaugaaaugcauaauaaaaaauuuuaaaaaaucuaaaagaucuaaaaaaaaaaaaaaaaaaaaaaaaaaaaaaaaaaaaaaaaaaaaaaaaaaaaaaaaaaaaaaaaugcaucccccccccccccccccccccccccccccccaaaggcucuuuucagagccaccagaauu

SEQ ID NO: 21105 - RNA, 937 nt, Artificial Sequence
  mRNA product Design d-4 comprising derived and/or modified sequence from HRSV(Memphis-37)__AIY60641.1__M2-1 (opt1)
gggagagucccgcagucggcguccagcggcucugcuuguucgugugugugucguugcaggccuuauucaagcuuaccaugagccgccggaaccccugcaaguucgagauccgcggccacugccugaacgggaagcggugccacuucucccacaacuacuucgaguggccgccccacgcccuccuggugcgccagaacuucaugcugaaccggauccucaagagcauggacaaguccaucgacacccugagcgagaucuccggcgccgcggagcuggaccgcaccgaggaguacgcccucggggucgugggcgugcuggagagcuacaucggguccaucaacaacaucacgaagcagagcgccugcgucgccauguccaagcugcucaccgagcugaacagcgacgacaucaagaagcugcgggacaacgaggagcccaacucccccaagauccgcguguacaacaccgugaucagcuacaucgaguccaaccggaagaacaacaagcagaccauccaccuccugaagcgccugccggccgacguccucaagaagacgaucaagaacacccuggacauccacaagagcaucaccaucaacaaccccaaggaguccaccgugaacgacacgaacgaccacgcgaagaacaacgacaccaccugaggacuaguggaagcauuuuccuggcugauuaaaagaaauuacucagcuauggucaucuguuccuguuagaaggcuaugcagcauauuauauacuaugcgcauguuaugaaaugcauaauaaaaaauuuuaaaaaaucuaaaagaucuaaaaaaaaaaaaaaaaaaaaaaaaaaaaaaaaaaaaaaaaaaaaaaaaaaaaaaaaaaaaaaaaugcaucccccccccccccccccccccccccccccccaaaggcucuuuucagagccaccagaauu

SEQ ID NO: 21106 - RNA, 937 nt, Artificial Sequence
  mRNA product Design d-4 comprising derived and/or modified sequence from HRSV(Memphis-37)__AIY60641.1__M2-1 (opt2)
gggagagucccgcagucggcguccagcggcucugcuuguucgugugugugucguugcaggccuuauucaagcuuaccaugucccgccgcaaccccugcaaguucgagauccgcggccacugccucaacggcaagcgcugccacuucucccacaacuacuucgaguggcccccccacgcccuccucguccgccagaacuucaugcucaaccgcauccucaaguccauggacaaguccaucgacacccucuccgagaucuccggcgccgccgagcucgaccgcaccgaggaguacgcccucggcgucgucggcguccucgaguccuacaucggcuccaucaacaacaucaccaagcaguccgccugcgucgccauguccaagcuccucaccgagcucaacuccgacgacaucaagaagcuccgcgacaacgaggagcccaacucccccaagauccgcgucuacaacaccgucaucuccuacaucgaguccaaccgcaagaacaacaagcagaccauccaccuccucaagcgccuccccgccgacguccucaagaagaccaucaagaacacccucgacauccacaaguccaucaccaucaacaaccccaaggaguccaccgucaacgacaccaacgaccacgccaagaacaacgacaccaccugaggacuaguggaagcauuuuccuggcugauuaaaagaaauuacucagcuauggucaucuguuccuguuagaaggcuaugcagcauauuauauacuaugcgcauguuaugaaaugcauaauaaaaaauuuuaaaaaaucuaaaagaucuaaaaaaaaaaaaaaaaaaaaaaaaaaaaaaaaaaaaaaaaaaaaaaaaaaaaaaaaaaaaaaaaugcaucccccccccccccccccccccccccccccccaaaggcucuuuucagagccaccagaauu

SEQ ID NO: 21107 - RNA, 937 nt, Artificial Sequence
  mRNA product Design d-4 comprising derived and/or modified sequence from HRSV(Memphis-37)__AIY60641.1__M2-1 (opt3)
gggagagucccgcagucggcguccagcggcucugcuuguucgugugugugucguugcaggccuuauucaagcuuaccaugagcagaaggaaccccugcaaguucgagauccggggccacugucugaaugggaaacgcugccauuuuucccacaacuacuucgaauggccuccacaugcacuccuugugcgacagaauuuuaugcugaaccguauuuugaagucuauggacaaaucaauagauaccuuaagugagaucagcggagcugcagaacuggacagaacagaggaauaugcccuaggugucguuggcgugcucgaguccuacauugggucuaucaauaacauuacuaagcaaucggcguguguagcuaugucaaaacugcuuacggagcugaauagcgaugacaucaagaaguugagggauaacgaggaaccgaauagucccaaaauacggguguauaacaccgucaucuccuacauugaaucuaaucgcaagaacaauaaacagacaauccaccuccugaagagacugccugccgacgugcucaaaaagacuauuaagaacaccuuagauauccauaaaagcauaacaauuaauaacccaaaggaguccaccguuaacgacacuaaugaucacgccaaaaacaaugacacaaccugaggacuaguggaagcauuuuccuggcugauuaaaagaaauuacucagcuauggucaucuguuccuguuagaaggcuaugcagcauauuauauacuaugcgcauguuaugaaaugcauaauaaaaaauuuuaaaaaaucuaaaagaucuaaaaaaaaaaaaaaaaaaaaaaaaaaaaaaaaaaaaaaaaaaaaaaaaaaaaaaaaaaaaaaaaugcaucccccccccccccccccccccccccccccccaaaggcucuuuucagagccaccagaauu

SEQ ID NO: 21108 - RNA, 937 nt, Artificial Sequence
  mRNA product Design d-4 comprising derived and/or modified sequence from HRSV(Memphis-37)__AIY60641.1__M2-1 (opt4)
gggagagucccgcagucggcguccagcggcucugcuuguucgugugugugucguugcaggccuuauucaagcuuaccaugagcagaagaaaccccugcaaguucgagaucagaggccacugccugaacggcaagagaugccacuucagccacaacuacuucgaguggcccccccacgcccugcuggugagacagaacuucaugcugaacagaauccugaagagcauggacaagagcaucgacacccugagcgagaucagcggcgccgccgagcuggacagaaccgaggaguacgcccugggcguggugggcgugcuggagagcuacaucggcagcaucaacaacaucaccaagcagagcgccugcguggccaugagcaagcugcugaccgagcugaacagcgacgacaucaagaagcugagagacaacgaggagcccaacagccccaagaucagaguguacaacaccgugaucagcuacaucgagagcaacagaaagaacaacaagcagaccauccaccugcugaagagacugcccgccgacgugcugaagaagaccaucaagaacacccuggacauccacaagagcaucaccaucaacaaccccaaggagagcaccgugaacgacaccaacgaccacgccaagaacaacgacaccaccugaggacuaguggaagcauuuuccuggcugauuaaaagaaauuacucagcuauggucaucuguuccuguuagaaggcuaugcagcauauuauauacuaugcgcauguuaugaaaugcauaauaaaaaauuuuaaaaaaucuaaaagaucuaaaaaaaaaaaaaaaaaaaaaaaaaaaaaaaaaaaaaaaaaaaaaaaaaaaaaaaaaaaaaaaaugcaucccccccccccccccccccccccccccccccaaaggcucuuuucagagccaccagaauu

SEQ ID NO: 21109 - RNA, 937 nt, Artificial Sequence
  mRNA product Design d-4 comprising derived and/or modified sequence from HRSV(Memphis-37)__AIY60641.1__M2-1 (opt5)
gggagagucccgcagucggcguccagcggcucugcuuguucgugugugugucguugcaggccuuauucaagcuuaccaugagcagacggaaccccugcaaguucgagauccgcggccacugucugaaugggaaaagaugccauuuuucccacaacuacuucgaauggccuccgcaugcccuccuggugcggcagaauuuuaugcuuaaccgcauucugaagucuauggacaaaagcaucgauacccucuccgagauuucuggagcugccgaacuggacagaacagaggaauaugcgcuuggcgucguuggggugcuggagagcuacaucggauccauuaauaacaucacgaagcaaucugcuuguguggccaugagcaaacuccugaccgagcucaauuccgaugacaucaagaagcugcgggauaacgaggaacccaauagcccuaaaauucgcgucuauaacacagugaucucuuacauugaauccaauagaaagaacaauaaacagaccauccaucugcuuaagcggcugcccgccgacguucucaaaaagacaauuaagaacacccuggauauccacaaaagcauuacaaucaauaacccuaaggagucuaccgugaacgacacgaaugaucacgcuaaaaacaaugacaccacaugaggacuaguggaagcauuuuccuggcugauuaaaagaaauuacucagcuauggucaucuguuccuguuagaaggcuaugcagcauauuauauacuaugcgcauguuaugaaaugcauaauaaaaaauuuuaaaaaaucuaaaagaucuaaaaaaaaaaaaaaaaaaaaaaaaaaaaaaaaaaaaaaaaaaaaaaaaaaaaaaaaaaaaaaaaugcaucccccccccccccccccccccccccccccccaaaggcucuuuucagagccaccagaauu

SEQ ID NO: 21110 - RNA, 937 nt, Artificial Sequence
  mRNA product Design d-4 comprising derived and/or modified sequence from HRSV(Memphis-37)__AIY60641.1__M2-1 (opt6)
gggagagucccgcagucggcguccagcggcucugcuuguucgugugugugucguugcaggccuuauucaagcuuaccauguccagacgaaacccaugcaaauucgaaauaagaggacacugccuaaacggaaaaagaugccacuucucacacaacuacuucgaauggccaccacacgcacuccucguaagacaaaacuucaugcuaaacagaauacuaaaaucaauggacaaaucaauagacacacucucagaaauaucaggagcagcagaacuagaccgaacagaagaauacgcacuaggaguaguaggaguacuagaauccuacauaggaucaauaaacaacauaacaaaacaaucagcaugcguagcaaugucaaaacuacuaacagaauuaaacucagacgacauaaaaaaacuaagagacaacgaagaaccaaacucaccaaaaauaagaguauacaacaccguaauaucauacauagaaucaaacagaaaaaacaacaaacaaacaauacaccuacuaaaaagacuaccagcagacguccuaaaaaaaacaauaaaaaacacacucgacauacacaaaucaauaaccauaaacaacccaaaagaaucaacaguaaacgacaccaacgaccacgcaaaaaacaaugacacaacauaaggacuaguggaagcauuuuccuggcugauuaaaagaaauuacucagcuauggucaucuguuccuguuagaaggcuaugcagcauauuauauacuaugcgcauguuaugaaaugcauaauaaaaaauuuuaaaaaaucuaaaagaucuaaaaaaaaaaaaaaaaaaaaaaaaaaaaaaaaaaaaaaaaaaaaaaaaaaaaaaaaaaaaaaaaugcaucccccccccccccccccccccccccccccccaaaggcucuuuucagagccaccagaauu

SEQ ID NO: 21111 - RNA, 937 nt, Artificial Sequence
  mRNA product Design d-4 comprising derived and/or modified sequence from HRSV(Memphis-37)__AIY60641.1__M2-1 (opt11)
gggagagucccgcagucggcguccagcggcucugcuuguucgugugugugucguugcaggccuuauucaagcuuaccaugucccgacgcaaccccugcaaauucgaaauccgaggccacugccucaacggcaaacgcugccacuucucccacaacuacuucgaauggcccccccacgcccuccucguacgccaaaacuucaugcucaaccgaauccucaagucaauggacaaauccaucgacacccucuccgaaaucuccggcgccgccgaacucgaccgcaccgaagaauacgcccucggcgucgucggcguccucgaauccuacaucggcuccaucaacaacaucaccaaacaauccgccugcgucgccauguccaaacuccucaccgaacucaacuccgacgacaucaaaaaacuccgcgacaacgaagaacccaacucccccaaaauccgcgucuacaacaccguuaucuccuacaucgaauccaaccgaaaaaacaacaaacaaaccauccaccuccucaaacgacuccccgccgacguccucaaaaaaaccaucaaaaauacccuagacauccacaaauccaucaccaucaacaaccccaaagaauccaccgucaacgacaccaacgaccacgccaaaaacaacgacaccaccuaaggacuaguggaagcauuuuccuggcugauuaaaagaaauuacucagcuauggucaucuguuccuguuagaaggcuaugcagcauauuauauacuaugcgcauguuaugaaaugcauaauaaaaaauuuuaaaaaaucuaaaagaucuaaaaaaaaaaaaaaaaaaaaaaaaaaaaaaaaaaaaaaaaaaaaaaaaaaaaaaaaaaaaaaaaugcaucccccccccccccccccccccccccccccccaaaggcucuuuucagagccaccagaauu

SEQ ID NO: 21112 - RNA, 1034 nt, Artificial Sequence
  mRNA product Design d-5 comprising derived and/or modified sequence from HRSV(Memphis-37)__AIY60641.1__M2-1 (wt)
gggagagggcgcuuggcuugcaaggacccugagcugcggcauugaagcacacccaacccaacucgacugaagucagccucacugaaccggaucugagaaucuucucucucugggcuugccagggcucuccgaaccuagcuagcauccucuucaauuccaacuagaaagcuuaccaugucacgaaggaauccuugcaaauuugaaauucgaggucauugcuugaaugguaagaggugucauuuuagucauaauuauuuugaauggccaccccaugcacugcuuguaagacaaaacuuuauguuaaacagaauacuuaagucuauggauaaaagcauagauacuuuaucagaaauaaguggagcugcagaguuggacagaacugaagaguaugcccucgguguaguuggagugcuagagaguuauauaggaucaauaaauaauauaacuaaacaaucagcauguguugccaugagcaaacuccucacugaacucaacagugaugacaucaaaaaacuaagagauaaugaagagccaaauucaccuaagauaagaguguacaauacugucauaucauauauugaaagcaacaggaaaaacaauaaacaaacuauccaucuguuaaaaagauugccagcagacguauugaagaaaaccaucaaaaacacauuggauauccacaagagcauaaccaucaacaacccaaaagaaucaacuguuaaugauacaaaugaccaugccaaaaauaaugauacuaccugaggacuaguggaagcauuuuccuggcugauuaaaagaaauuacucagcuauggucaucuguuccuguuagaaggcuaugcagcauauuauauacuaugcgcauguuaugaaaugcauaauaaaaaauuuuaaaaaaucuaaaagaucuaaaaaaaaaaaaaaaaaaaaaaaaaaaaaaaaaaaaaaaaaaaaaaaaaaaaaaaaaaaaaaaaugcaucccccccccccccccccccccccccccccccaaaggcucuuuucagagccaccagaauu

SEQ ID NO: 21113 - RNA, 1034 nt, Artificial Sequence
  mRNA product Design d-5 comprising derived and/or modified sequence from HRSV(Memphis-37)__AIY60641.1__M2-1 (opt1)
gggagagggcgcuuggcuugcaaggacccugagcugcggcauugaagcacacccaacccaacucgacugaagucagccucacugaaccggaucugagaaucuucucucucugggcuugccagggcucuccgaaccuagcuagcauccucuucaauuccaacuagaaagcuuaccaugagccgccggaaccccugcaaguucgagauccgcggccacugccugaacgggaagcggugccacuucucccacaacuacuucgaguggccgccccacgcccuccuggugcgccagaacuucaugcugaaccggauccucaagagcauggacaaguccaucgacacccugagcgagaucuccggcgccgcggagcuggaccgcaccgaggaguacgcccucggggucgugggcgugcuggagagcuacaucggguccaucaacaacaucacgaagcagagcgccugcgucgccauguccaagcugcucaccgagcugaacagcgacgacaucaagaagcugcgggacaacgaggagcccaacucccccaagauccgcguguacaacaccgugaucagcuacaucgaguccaaccggaagaacaacaagcagaccauccaccuccugaagcgccugccggccgacguccucaagaagacgaucaagaacacccuggacauccacaagagcaucaccaucaacaaccccaaggaguccaccgugaacgacacgaacgaccacgcgaagaacaacgacaccaccugaggacuaguggaagcauuuuccuggcugauuaaaagaaauuacucagcuauggucaucuguuccuguuagaaggcuaugcagcauauuauauacuaugcgcauguuaugaaaugcauaauaaaaaauuuuaaaaaaucuaaaagaucuaaaaaaaaaaaaaaaaaaaaaaaaaaaaaaaaaaaaaaaaaaaaaaaaaaaaaaaaaaaaaaaaugcaucccccccccccccccccccccccccccccccaaaggcucuuuucagagccaccagaauu

SEQ ID NO: 21114 - RNA, 1034 nt, Artificial Sequence
  mRNA product Design d-5 comprising derived and/or modified sequence from HRSV(Memphis-37)__AIY60641.1__M2-1 (opt2)
gggagagggcgcuuggcuugcaaggacccugagcugcggcauugaagcacacccaacccaacucgacugaagucagccucacugaaccggaucugagaaucuucucucucugggcuugccagggcucuccgaaccuagcuagcauccucuucaauuccaacuagaaagcuuaccaugucccgccgcaaccccugcaaguucgagauccgcggccacugccucaacggcaagcgcugccacuucucccacaacuacuucgaguggcccccccacgcccuccucguccgccagaacuucaugcucaaccgcauccucaaguccauggacaaguccaucgacacccucuccgagaucuccggcgccgccgagcucgaccgcaccgaggaguacgcccucggcgucgucggcguccucgaguccuacaucggcuccaucaacaacaucaccaagcaguccgccugcgucgccauguccaagcuccucaccgagcucaacuccgacgacaucaagaagcuccgcgacaacgaggagcccaacucccccaagauccgcgucuacaacaccgucaucuccuacaucgaguccaaccgcaagaacaacaagcagaccauccaccuccucaagcgccuccccgccgacguccucaagaagaccaucaagaacacccucgacauccacaaguccaucaccaucaacaaccccaaggaguccaccgucaacgacaccaacgaccacgccaagaacaacgacaccaccugaggacuaguggaagcauuuuccuggcugauuaaaagaaauuacucagcuauggucaucuguuccuguuagaaggcuaugcagcauauuauauacuaugcgcauguuaugaaaugcauaauaaaaaauuuuaaaaaaucuaaaagaucuaaaaaaaaaaaaaaaaaaaaaaaaaaaaaaaaaaaaaaaaaaaaaaaaaaaaaaaaaaaaaaaaugcaucccccccccccccccccccccccccccccccaaaggcucuuuucagagccaccagaauu

SEQ ID NO: 21115 - RNA, 1034 nt, Artificial Sequence
  mRNA product Design d-5 comprising derived and/or modified sequence from HRSV(Memphis-37)__AIY60641.1__M2-1 (opt3)
gggagagggcgcuuggcuugcaaggacccugagcugcggcauugaagcacacccaacccaacucgacugaagucagccucacugaaccggaucugagaaucuucucucucugggcuugccagggcucuccgaaccuagcuagcauccucuucaauuccaacuagaaagcuuaccaugagcagaaggaaccccugcaaguucgagauccggggccacugucugaaugggaaacgcugccauuuuucccacaacuacuucgaauggccuccacaugcacuccuugugcgacagaauuuuaugcugaaccguauuuugaagucuauggacaaaucaauagauaccuuaagugagaucagcggagcugcagaacuggacagaacagaggaauaugcccuaggugucguuggcgugcucgaguccuacauugggucuaucaauaacauuacuaagcaaucggcguguguagcuaugucaaaacugcuuacggagcugaauagcgaugacaucaagaaguugagggauaacgaggaaccgaauagucccaaaauacggguguauaacaccgucaucuccuacauugaaucuaaucgcaagaacaauaaacagacaauccaccuccugaagagacugccugccgacgugcucaaaaagacuauuaagaacaccuuagauauccauaaaagcauaacaauuaauaacccaaaggaguccaccguuaacgacacuaaugaucacgccaaaaacaaugacacaaccugaggacuaguggaagcauuuuccuggcugauuaaaagaaauuacucagcuauggucaucuguuccuguuagaaggcuaugcagcauauuauauacuaugcgcauguuaugaaaugcauaauaaaaaauuuuaaaaaaucuaaaagaucuaaaaaaaaaaaaaaaaaaaaaaaaaaaaaaaaaaaaaaaaaaaaaaaaaaaaaaaaaaaaaaaaugcaucccccccccccccccccccccccccccccccaaaggcucuuuucagagccaccagaauu

SEQ ID NO: 21116 - RNA, 1034 nt, Artificial Sequence
  mRNA product Design d-5 comprising derived and/or modified sequence from HRSV(Memphis-37)__AIY60641.1__M2-1 (opt4)
gggagagggcgcuuggcuugcaaggacccugagcugcggcauugaagcacacccaacccaacucgacugaagucagccucacugaaccggaucugagaaucuucucucucugggcuugccagggcucuccgaaccuagcuagcauccucuucaauuccaacuagaaagcuuaccaugagcagaagaaaccccugcaaguucgagaucagaggccacugccugaacggcaagagaugccacuucagccacaacuacuucgaguggcccccccacgcccugcuggugagacagaacuucaugcugaacagaauccugaagagcauggacaagagcaucgacacccugagcgagaucagcggcgccgccgagcuggacagaaccgaggaguacgcccugggcguggugggcgugcuggagagcuacaucggcagcaucaacaacaucaccaagcagagcgccugcguggccaugagcaagcugcugaccgagcugaacagcgacgacaucaagaagcugagagacaacgaggagcccaacagccccaagaucagaguguacaacaccgugaucagcuacaucgagagcaacagaaagaacaacaagcagaccauccaccugcugaagagacugcccgccgacgugcugaagaagaccaucaagaacacccuggacauccacaagagcaucaccaucaacaaccccaaggagagcaccgugaacgacaccaacgaccacgccaagaacaacgacaccaccugaggacuaguggaagcauuuuccuggcugauuaaaagaaauuacucagcuauggucaucuguuccuguuagaaggcuaugcagcauauuauauacuaugcgcauguuaugaaaugcauaauaaaaaauuuuaaaaaaucuaaaagaucuaaaaaaaaaaaaaaaaaaaaaaaaaaaaaaaaaaaaaaaaaaaaaaaaaaaaaaaaaaaaaaaaugcaucccccccccccccccccccccccccccccccaaaggcucuuuucagagccaccagaauu

SEQ ID NO: 21117 - RNA, 1034 nt, Artificial Sequence
  mRNA product Design d-5 comprising derived and/or modified sequence from HRSV(Memphis-37)__AIY60641.1__M2-1 (opt5)
gggagagggcgcuuggcuugcaaggacccugagcugcggcauugaagcacacccaacccaacucgacugaagucagccucacugaaccggaucugagaaucuucucucucugggcuugccagggcucuccgaaccuagcuagcauccucuucaauuccaacuagaaagcuuaccaugagcagacggaaccccugcaaguucgagauccgcggccacugucugaaugggaaaagaugccauuuuucccacaacuacuucgaauggccuccgcaugcccuccuggugcggcagaauuuuaugcuuaaccgcauucugaagucuauggacaaaagcaucgauacccucuccgagauuucuggagcugccgaacuggacagaacagaggaauaugcgcuuggcgucguuggggugcuggagagcuacaucggauccauuaauaacaucacgaagcaaucugcuuguguggccaugagcaaacuccugaccgagcucaauuccgaugacaucaagaagcugcgggauaacgaggaacccaauagcccuaaaauucgcgucuauaacacagugaucucuuacauugaauccaauagaaagaacaauaaacagaccauccaucugcuuaagcggcugcccgccgacguucucaaaaagacaauuaagaacacccuggauauccacaaaagcauuacaaucaauaacccuaaggagucuaccgugaacgacacgaaugaucacgcuaaaaacaaugacaccacaugaggacuaguggaagcauuuuccuggcugauuaaaagaaauuacucagcuauggucaucuguuccuguuagaaggcuaugcagcauauuauauacuaugcgcauguuaugaaaugcauaauaaaaaauuuuaaaaaaucuaaaagaucuaaaaaaaaaaaaaaaaaaaaaaaaaaaaaaaaaaaaaaaaaaaaaaaaaaaaaaaaaaaaaaaaugcaucccccccccccccccccccccccccccccccaaaggcucuuuucagagccaccagaauu

SEQ ID NO: 21118 - RNA, 1034 nt, Artificial Sequence
  mRNA product Design d-5 comprising derived and/or modified sequence from HRSV(Memphis-37)__AIY60641.1__M2-1 (opt6)
gggagagggcgcuuggcuugcaaggacccugagcugcggcauugaagcacacccaacccaacucgacugaagucagccucacugaaccggaucugagaaucuucucucucugggcuugccagggcucuccgaaccuagcuagcauccucuucaauuccaacuagaaagcuuaccauguccagacgaaacccaugcaaauucgaaauaagaggacacugccuaaacggaaaaagaugccacuucucacacaacuacuucgaauggccaccacacgcacuccucguaagacaaaacuucaugcuaaacagaauacuaaaaucaauggacaaaucaauagacacacucucagaaauaucaggagcagcagaacuagaccgaacagaagaauacgcacuaggaguaguaggaguacuagaauccuacauaggaucaauaaacaacauaacaaaacaaucagcaugcguagcaaugucaaaacuacuaacagaauuaaacucagacgacauaaaaaaacuaagagacaacgaagaaccaaacucaccaaaaauaagaguauacaacaccguaauaucauacauagaaucaaacagaaaaaacaacaaacaaacaauacaccuacuaaaaagacuaccagcagacguccuaaaaaaaacaauaaaaaacacacucgacauacacaaaucaauaaccauaaacaacccaaaagaaucaacaguaaacgacaccaacgaccacgcaaaaaacaaugacacaacauaaggacuaguggaagcauuuuccuggcugauuaaaagaaauuacucagcuauggucaucuguuccuguuagaaggcuaugcagcauauuauauacuaugcgcauguuaugaaaugcauaauaaaaaauuuuaaaaaaucuaaaagaucuaaaaaaaaaaaaaaaaaaaaaaaaaaaaaaaaaaaaaaaaaaaaaaaaaaaaaaaaaaaaaaaaugcaucccccccccccccccccccccccccccccccaaaggcucuuuucagagccaccagaauu

SEQ ID NO: 21119 - RNA, 1034 nt, Artificial Sequence
  mRNA product Design d-5 comprising derived and/or modified sequence from HRSV(Memphis-37)__AIY60641.1__M2-1 (opt11)
gggagagggcgcuuggcuugcaaggacccugagcugcggcauugaagcacacccaacccaacucgacugaagucagccucacugaaccggaucugagaaucuucucucucugggcuugccagggcucuccgaaccuagcuagcauccucuucaauuccaacuagaaagcuuaccaugucccgacgcaaccccugcaaauucgaaauccgaggccacugccucaacggcaaacgcugccacuucucccacaacuacuucgaauggcccccccacgcccuccucguacgccaaaacuucaugcucaaccgaauccucaagucaauggacaaauccaucgacacccucuccgaaaucuccggcgccgccgaacucgaccgcaccgaagaauacgcccucggcgucgucggcguccucgaauccuacaucggcuccaucaacaacaucaccaaacaauccgccugcgucgccauguccaaacuccucaccgaacucaacuccgacgacaucaaaaaacuccgcgacaacgaagaacccaacucccccaaaauccgcgucuacaacaccguuaucuccuacaucgaauccaaccgaaaaaacaacaaacaaaccauccaccuccucaaacgacuccccgccgacguccucaaaaaaaccaucaaaaauacccuagacauccacaaauccaucaccaucaacaaccccaaagaauccaccgucaacgacaccaacgaccacgccaaaaacaacgacaccaccuaaggacuaguggaagcauuuuccuggcugauuaaaagaaauuacucagcuauggucaucuguuccuguuagaaggcuaugcagcauauuauauacuaugcgcauguuaugaaaugcauaauaaaaaauuuuaaaaaaucuaaaagaucuaaaaaaaaaaaaaaaaaaaaaaaaaaaaaaaaaaaaaaaaaaaaaaaaaaaaaaaaaaaaaaaaugcaucccccccccccccccccccccccccccccccaaaggcucuuuucagagccaccagaauu

SEQ ID NO: 21120 - RNA, 914 nt, Artificial Sequence
  mRNA product Design e-1 comprising derived and/or modified sequence from HRSV(Memphis-37)__AIY60641.1__M2-1 (wt)
gggagaauauaagcguuggcggagcgucgguuguagcacucugcgcgcccgcucuucugcugcuguuugucuacuuccuccugcuuccccgccgccgccgccgccaucaagcuuaccaugucacgaaggaauccuugcaaauuugaaauucgaggucauugcuugaaugguaagaggugucauuuuagucauaauuauuuugaauggccaccccaugcacugcuuguaagacaaaacuuuauguuaaacagaauacuuaagucuauggauaaaagcauagauacuuuaucagaaauaaguggagcugcagaguuggacagaacugaagaguaugcccucgguguaguuggagugcuagagaguuauauaggaucaauaaauaauauaacuaaacaaucagcauguguugccaugagcaaacuccucacugaacucaacagugaugacaucaaaaaacuaagagauaaugaagagccaaauucaccuaagauaagaguguacaauacugucauaucauauauugaaagcaacaggaaaaacaauaaacaaacuauccaucuguuaaaaagauugccagcagacguauugaagaaaaccaucaaaaacacauuggauauccacaagagcauaaccaucaacaacccaaaagaaucaacuguuaaugauacaaaugaccaugccaaaaauaaugauacuaccugaggacuaguguccaccugucccuccugggcugcuggauugucucguuuuccugccaaauaaacaggaucagcgcuuuacagaucuaaaaaaaaaaaaaaaaaaaaaaaaaaaaaaaaaaaaaaaaaaaaaaaaaaaaaaaaaaaaaaaaugcaucccccccccccccccccccccccccccccccaaaggcucuuuucagagccaccagaauu

SEQ ID NO: 21121 - RNA, 914 nt, Artificial Sequence
  mRNA product Design e-1 comprising derived and/or modified sequence from HRSV(Memphis-37)__AIY60641.1__M2-1 (opt1)
gggagaauauaagcguuggcggagcgucgguuguagcacucugcgcgcccgcucuucugcugcuguuugucuacuuccuccugcuuccccgccgccgccgccgccaucaagcuuaccaugagccgccggaaccccugcaaguucgagauccgcggccacugccugaacgggaagcggugccacuucucccacaacuacuucgaguggccgccccacgcccuccuggugcgccagaacuucaugcugaaccggauccucaagagcauggacaaguccaucgacacccugagcgagaucuccggcgccgcggagcuggaccgcaccgaggaguacgcccucggggucgugggcgugcuggagagcuacaucggguccaucaacaacaucacgaagcagagcgccugcgucgccauguccaagcugcucaccgagcugaacagcgacgacaucaagaagcugcgggacaacgaggagcccaacucccccaagauccgcguguacaacaccgugaucagcuacaucgaguccaaccggaagaacaacaagcagaccauccaccuccugaagcgccugccggccgacguccucaagaagacgaucaagaacacccuggacauccacaagagcaucaccaucaacaaccccaaggaguccaccgugaacgacacgaacgaccacgcgaagaacaacgacaccaccugaggacuaguguccaccugucccuccugggcugcuggauugucucguuuuccugccaaauaaacaggaucagcgcuuuacagaucuaaaaaaaaaaaaaaaaaaaaaaaaaaaaaaaaaaaaaaaaaaaaaaaaaaaaaaaaaaaaaaaaugcaucccccccccccccccccccccccccccccccaaaggcucuuuucagagccaccagaauu

SEQ ID NO: 21122 - RNA, 914 nt, Artificial Sequence
  mRNA product Design e-1 comprising derived and/or modified sequence from HRSV(Memphis-37)__AIY60641.1__M2-1 (opt2)
gggagaauauaagcguuggcggagcgucgguuguagcacucugcgcgcccgcucuucugcugcuguuugucuacuuccuccugcuuccccgccgccgccgccgccaucaagcuuaccaugucccgccgcaaccccugcaaguucgagauccgcggccacugccucaacggcaagcgcugccacuucucccacaacuacuucgaguggcccccccacgcccuccucguccgccagaacuucaugcucaaccgcauccucaaguccauggacaaguccaucgacacccucuccgagaucuccggcgccgccgagcucgaccgcaccgaggaguacgcccucggcgucgucggcguccucgaguccuacaucggcuccaucaacaacaucaccaagcaguccgccugcgucgccauguccaagcuccucaccgagcucaacuccgacgacaucaagaagcuccgcgacaacgaggagcccaacucccccaagauccgcgucuacaacaccgucaucuccuacaucgaguccaaccgcaagaacaacaagcagaccauccaccuccucaagcgccuccccgccgacguccucaagaagaccaucaagaacacccucgacauccacaaguccaucaccaucaacaaccccaaggaguccaccgucaacgacaccaacgaccacgccaagaacaacgacaccaccugaggacuaguguccaccugucccuccugggcugcuggauugucucguuuuccugccaaauaaacaggaucagcgcuuuacagaucuaaaaaaaaaaaaaaaaaaaaaaaaaaaaaaaaaaaaaaaaaaaaaaaaaaaaaaaaaaaaaaaaugcaucccccccccccccccccccccccccccccccaaaggcucuuuucagagccaccagaauu

SEQ ID NO: 21123 - RNA, 914 nt, Artificial Sequence
  mRNA product Design e-1 comprising derived and/or modified sequence from HRSV(Memphis-37)__AIY60641.1__M2-1 (opt3)
gggagaauauaagcguuggcggagcgucgguuguagcacucugcgcgcccgcucuucugcugcuguuugucuacuuccuccugcuuccccgccgccgccgccgccaucaagcuuaccaugagcagaaggaaccccugcaaguucgagauccggggccacugucugaaugggaaacgcugccauuuuucccacaacuacuucgaauggccuccacaugcacuccuugugcgacagaauuuuaugcugaaccguauuuugaagucuauggacaaaucaauagauaccuuaagugagaucagcggagcugcagaacuggacagaacagaggaauaugcccuaggugucguuggcgugcucgaguccuacauugggucuaucaauaacauuacuaagcaaucggcguguguagcuaugucaaaacugcuuacggagcugaauagcgaugacaucaagaaguugagggauaacgaggaaccgaauagucccaaaauacggguguauaacaccgucaucuccuacauugaaucuaaucgcaagaacaauaaacagacaauccaccuccugaagagacugccugccgacgugcucaaaaagacuauuaagaacaccuuagauauccauaaaagcauaacaauuaauaacccaaaggaguccaccguuaacgacacuaaugaucacgccaaaaacaaugacacaaccugaggacuaguguccaccugucccuccugggcugcuggauugucucguuuuccugccaaauaaacaggaucagcgcuuuacagaucuaaaaaaaaaaaaaaaaaaaaaaaaaaaaaaaaaaaaaaaaaaaaaaaaaaaaaaaaaaaaaaaaugcaucccccccccccccccccccccccccccccccaaaggcucuuuucagagccaccagaauu

SEQ ID NO: 21124 - RNA, 914 nt, Artificial Sequence
  mRNA product Design e-1 comprising derived and/or modified sequence from HRSV(Memphis-37)__AIY60641.1__M2-1 (opt4)
gggagaauauaagcguuggcggagcgucgguuguagcacucugcgcgcccgcucuucugcugcuguuugucuacuuccuccugcuuccccgccgccgccgccgccaucaagcuuaccaugagcagaagaaaccccugcaaguucgagaucagaggccacugccugaacggcaagagaugccacuucagccacaacuacuucgaguggcccccccacgcccugcuggugagacagaacuucaugcugaacagaauccugaagagcauggacaagagcaucgacacccugagcgagaucagcggcgccgccgagcuggacagaaccgaggaguacgcccugggcguggugggcgugcuggagagcuacaucggcagcaucaacaacaucaccaagcagagcgccugcguggccaugagcaagcugcugaccgagcugaacagcgacgacaucaagaagcugagagacaacgaggagcccaacagccccaagaucagaguguacaacaccgugaucagcuacaucgagagcaacagaaagaacaacaagcagaccauccaccugcugaagagacugcccgccgacgugcugaagaagaccaucaagaacacccuggacauccacaagagcaucaccaucaacaaccccaaggagagcaccgugaacgacaccaacgaccacgccaagaacaacgacaccaccugaggacuaguguccaccugucccuccugggcugcuggauugucucguuuuccugccaaauaaacaggaucagcgcuuuacagaucuaaaaaaaaaaaaaaaaaaaaaaaaaaaaaaaaaaaaaaaaaaaaaaaaaaaaaaaaaaaaaaaaugcaucccccccccccccccccccccccccccccccaaaggcucuuuucagagccaccagaauu

SEQ ID NO: 21125 - RNA, 914 nt, Artificial Sequence
  mRNA product Design e-1 comprising derived and/or modified sequence from HRSV(Memphis-37)__AIY60641.1__M2-1 (opt5)
gggagaauauaagcguuggcggagcgucgguuguagcacucugcgcgcccgcucuucugcugcuguuugucuacuuccuccugcuuccccgccgccgccgccgccaucaagcuuaccaugagcagacggaaccccugcaaguucgagauccgcggccacugucugaaugggaaaagaugccauuuuucccacaacuacuucgaauggccuccgcaugcccuccuggugcggcagaauuuuaugcuuaaccgcauucugaagucuauggacaaaagcaucgauacccucuccgagauuucuggagcugccgaacuggacagaacagaggaauaugcgcuuggcgucguuggggugcuggagagcuacaucggauccauuaauaacaucacgaagcaaucugcuuguguggccaugagcaaacuccugaccgagcucaauuccgaugacaucaagaagcugcgggauaacgaggaacccaauagcccuaaaauucgcgucuauaacacagugaucucuuacauugaauccaauagaaagaacaauaaacagaccauccaucugcuuaagcggcugcccgccgacguucucaaaaagacaauuaagaacacccuggauauccacaaaagcauuacaaucaauaacccuaaggagucuaccgugaacgacacgaaugaucacgcuaaaaacaaugacaccacaugaggacuaguguccaccugucccuccugggcugcuggauugucucguuuuccugccaaauaaacaggaucagcgcuuuacagaucuaaaaaaaaaaaaaaaaaaaaaaaaaaaaaaaaaaaaaaaaaaaaaaaaaaaaaaaaaaaaaaaaugcaucccccccccccccccccccccccccccccccaaaggcucuuuucagagccaccagaauu

SEQ ID NO: 21126 - RNA, 914 nt, Artificial Sequence
  mRNA product Design e-1 comprising derived and/or modified sequence from HRSV(Memphis-37)__AIY60641.1__M2-1 (opt6)
gggagaauauaagcguuggcggagcgucgguuguagcacucugcgcgcccgcucuucugcugcuguuugucuacuuccuccugcuuccccgccgccgccgccgccaucaagcuuaccauguccagacgaaacccaugcaaauucgaaauaagaggacacugccuaaacggaaaaagaugccacuucucacacaacuacuucgaauggccaccacacgcacuccucguaagacaaaacuucaugcuaaacagaauacuaaaaucaauggacaaaucaauagacacacucucagaaauaucaggagcagcagaacuagaccgaacagaagaauacgcacuaggaguaguaggaguacuagaauccuacauaggaucaauaaacaacauaacaaaacaaucagcaugcguagcaaugucaaaacuacuaacagaauuaaacucagacgacauaaaaaaacuaagagacaacgaagaaccaaacucaccaaaaauaagaguauacaacaccguaauaucauacauagaaucaaacagaaaaaacaacaaacaaacaauacaccuacuaaaaagacuaccagcagacguccuaaaaaaaacaauaaaaaacacacucgacauacacaaaucaauaaccauaaacaacccaaaagaaucaacaguaaacgacaccaacgaccacgcaaaaaacaaugacacaacauaaggacuaguguccaccugucccuccugggcugcuggauugucucguuuuccugccaaauaaacaggaucagcgcuuuacagaucuaaaaaaaaaaaaaaaaaaaaaaaaaaaaaaaaaaaaaaaaaaaaaaaaaaaaaaaaaaaaaaaaugcaucccccccccccccccccccccccccccccccaaaggcucuuuucagagccaccagaauu

SEQ ID NO: 21127 - RNA, 914 nt, Artificial Sequence
  mRNA product Design e-1 comprising derived and/or modified sequence from HRSV(Memphis-37)__AIY60641.1__M2-1 (opt11)
gggagaauauaagcguuggcggagcgucgguuguagcacucugcgcgcccgcucuucugcugcuguuugucuacuuccuccugcuuccccgccgccgccgccgccaucaagcuuaccaugucccgacgcaaccccugcaaauucgaaauccgaggccacugccucaacggcaaacgcugccacuucucccacaacuacuucgaauggcccccccacgcccuccucguacgccaaaacuucaugcucaaccgaauccucaagucaauggacaaauccaucgacacccucuccgaaaucuccggcgccgccgaacucgaccgcaccgaagaauacgcccucggcgucgucggcguccucgaauccuacaucggcuccaucaacaacaucaccaaacaauccgccugcgucgccauguccaaacuccucaccgaacucaacuccgacgacaucaaaaaacuccgcgacaacgaagaacccaacucccccaaaauccgcgucuacaacaccguuaucuccuacaucgaauccaaccgaaaaaacaacaaacaaaccauccaccuccucaaacgacuccccgccgacguccucaaaaaaaccaucaaaaauacccuagacauccacaaauccaucaccaucaacaaccccaaagaauccaccgucaacgacaccaacgaccacgccaaaaacaacgacaccaccuaaggacuaguguccaccugucccuccugggcugcuggauugucucguuuuccugccaaauaaacaggaucagcgcuuuacagaucuaaaaaaaaaaaaaaaaaaaaaaaaaaaaaaaaaaaaaaaaaaaaaaaaaaaaaaaaaaaaaaaaugcaucccccccccccccccccccccccccccccccaaaggcucuuuucagagccaccagaauu

SEQ ID NO: 21128 - RNA, 896 nt, Artificial Sequence
  mRNA product Design e-2 comprising derived and/or modified sequence from HRSV(Memphis-37)__AIY60641.1__M2-1 (wt)
gggagacccgugacccggaaguuguacggcuacgcgacuuucccucccacaaacccucgcgcccuuccuuuccuacuugggcccggcagaaagcuuaccaugucacgaaggaauccuugcaaauuugaaauucgaggucauugcuugaaugguaagaggugucauuuuagucauaauuauuuugaauggccaccccaugcacugcuuguaagacaaaacuuuauguuaaacagaauacuuaagucuauggauaaaagcauagauacuuuaucagaaauaaguggagcugcagaguuggacagaacugaagaguaugcccucgguguaguuggagugcuagagaguuauauaggaucaauaaauaauauaacuaaacaaucagcauguguugccaugagcaaacuccucacugaacucaacagugaugacaucaaaaaacuaagagauaaugaagagccaaauucaccuaagauaagaguguacaauacugucauaucauauauugaaagcaacaggaaaaacaauaaacaaacuauccaucuguuaaaaagauugccagcagacguauugaagaaaaccaucaaaaacacauuggauauccacaagagcauaaccaucaacaacccaaaagaaucaacuguuaaugauacaaaugaccaugccaaaaauaaugauacuaccugaggacuaguguccaccugucccuccugggcugcuggauugucucguuuuccugccaaauaaacaggaucagcgcuuuacagaucuaaaaaaaaaaaaaaaaaaaaaaaaaaaaaaaaaaaaaaaaaaaaaaaaaaaaaaaaaaaaaaaaugcaucccccccccccccccccccccccccccccccaaaggcucuuuucagagccaccagaauu

SEQ ID NO: 21129 - RNA, 896 nt, Artificial Sequence
  mRNA product Design e-2 comprising derived and/or modified sequence from HRSV(Memphis-37)__AIY60641.1__M2-1 (opt1)
gggagacccgugacccggaaguuguacggcuacgcgacuuucccucccacaaacccucgcgcccuuccuuuccuacuugggcccggcagaaagcuuaccaugagccgccggaaccccugcaaguucgagauccgcggccacugccugaacgggaagcggugccacuucucccacaacuacuucgaguggccgccccacgcccuccuggugcgccagaacuucaugcugaaccggauccucaagagcauggacaaguccaucgacacccugagcgagaucuccggcgccgcggagcuggaccgcaccgaggaguacgcccucggggucgugggcgugcuggagagcuacaucggguccaucaacaacaucacgaagcagagcgccugcgucgccauguccaagcugcucaccgagcugaacagcgacgacaucaagaagcugcgggacaacgaggagcccaacucccccaagauccgcguguacaacaccgugaucagcuacaucgaguccaaccggaagaacaacaagcagaccauccaccuccugaagcgccugccggccgacguccucaagaagacgaucaagaacacccuggacauccacaagagcaucaccaucaacaaccccaaggaguccaccgugaacgacacgaacgaccacgcgaagaacaacgacaccaccugaggacuaguguccaccugucccuccugggcugcuggauugucucguuuuccugccaaauaaacaggaucagcgcuuuacagaucuaaaaaaaaaaaaaaaaaaaaaaaaaaaaaaaaaaaaaaaaaaaaaaaaaaaaaaaaaaaaaaaaugcaucccccccccccccccccccccccccccccccaaaggcucuuuucagagccaccagaauu

SEQ ID NO: 21130 - RNA, 896 nt, Artificial Sequence
  mRNA product Design e-2 comprising derived and/or modified sequence from HRSV(Memphis-37)__AIY60641.1__M2-1 (opt2)
gggagacccgugacccggaaguuguacggcuacgcgacuuucccucccacaaacccucgcgcccuuccuuuccuacuugggcccggcagaaagcuuaccaugucccgccgcaaccccugcaaguucgagauccgcggccacugccucaacggcaagcgcugccacuucucccacaacuacuucgaguggcccccccacgcccuccucguccgccagaacuucaugcucaaccgcauccucaaguccauggacaaguccaucgacacccucuccgagaucuccggcgccgccgagcucgaccgcaccgaggaguacgcccucggcgucgucggcguccucgaguccuacaucggcuccaucaacaacaucaccaagcaguccgccugcgucgccauguccaagcuccucaccgagcucaacuccgacgacaucaagaagcuccgcgacaacgaggagcccaacucccccaagauccgcgucuacaacaccgucaucuccuacaucgaguccaaccgcaagaacaacaagcagaccauccaccuccucaagcgccuccccgccgacguccucaagaagaccaucaagaacacccucgacauccacaaguccaucaccaucaacaaccccaaggaguccaccgucaacgacaccaacgaccacgccaagaacaacgacaccaccugaggacuaguguccaccugucccuccugggcugcuggauugucucguuuuccugccaaauaaacaggaucagcgcuuuacagaucuaaaaaaaaaaaaaaaaaaaaaaaaaaaaaaaaaaaaaaaaaaaaaaaaaaaaaaaaaaaaaaaaugcaucccccccccccccccccccccccccccccccaaaggcucuuuucagagccaccagaauu

SEQ ID NO: 21131 - RNA, 896 nt, Artificial Sequence
  mRNA product Design e-2 comprising derived and/or modified sequence from HRSV(Memphis-37)__AIY60641.1__M2-1 (opt3)
gggagacccgugacccggaaguuguacggcuacgcgacuuucccucccacaaacccucgcgcccuuccuuuccuacuugggcccggcagaaagcuuaccaugagcagaaggaaccccugcaaguucgagauccggggccacugucugaaugggaaacgcugccauuuuucccacaacuacuucgaauggccuccacaugcacuccuugugcgacagaauuuuaugcugaaccguauuuugaagucuauggacaaaucaauagauaccuuaagugagaucagcggagcugcagaacuggacagaacagaggaauaugcccuaggugucguuggcgugcucgaguccuacauugggucuaucaauaacauuacuaagcaaucggcguguguagcuaugucaaaacugcuuacggagcugaauagcgaugacaucaagaaguugagggauaacgaggaaccgaauagucccaaaauacggguguauaacaccgucaucuccuacauugaaucuaaucgcaagaacaauaaacagacaauccaccuccugaagagacugccugccgacgugcucaaaaagacuauuaagaacaccuuagauauccauaaaagcauaacaauuaauaacccaaaggaguccaccguuaacgacacuaaugaucacgccaaaaacaaugacacaaccugaggacuaguguccaccugucccuccugggcugcuggauugucucguuuuccugccaaauaaacaggaucagcgcuuuacagaucuaaaaaaaaaaaaaaaaaaaaaaaaaaaaaaaaaaaaaaaaaaaaaaaaaaaaaaaaaaaaaaaaugcaucccccccccccccccccccccccccccccccaaaggcucuuuucagagccaccagaauu

SEQ ID NO: 21132 - RNA, 896 nt, Artificial Sequence
  mRNA product Design e-2 comprising derived and/or modified sequence from HRSV(Memphis-37)__AIY60641.1__M2-1 (opt4)
gggagacccgugacccggaaguuguacggcuacgcgacuuucccucccacaaacccucgcgcccuuccuuuccuacuugggcccggcagaaagcuuaccaugagcagaagaaaccccugcaaguucgagaucagaggccacugccugaacggcaagagaugccacuucagccacaacuacuucgaguggcccccccacgcccugcuggugagacagaacuucaugcugaacagaauccugaagagcauggacaagagcaucgacacccugagcgagaucagcggcgccgccgagcuggacagaaccgaggaguacgcccugggcguggugggcgugcuggagagcuacaucggcagcaucaacaacaucaccaagcagagcgccugcguggccaugagcaagcugcugaccgagcugaacagcgacgacaucaagaagcugagagacaacgaggagcccaacagccccaagaucagaguguacaacaccgugaucagcuacaucgagagcaacagaaagaacaacaagcagaccauccaccugcugaagagacugcccgccgacgugcugaagaagaccaucaagaacacccuggacauccacaagagcaucaccaucaacaaccccaaggagagcaccgugaacgacaccaacgaccacgccaagaacaacgacaccaccugaggacuaguguccaccugucccuccugggcugcuggauugucucguuuuccugccaaauaaacaggaucagcgcuuuacagaucuaaaaaaaaaaaaaaaaaaaaaaaaaaaaaaaaaaaaaaaaaaaaaaaaaaaaaaaaaaaaaaaaugcaucccccccccccccccccccccccccccccccaaaggcucuuuucagagccaccagaauu

SEQ ID NO: 21133 - RNA, 896 nt, Artificial Sequence
  mRNA product Design e-2 comprising derived and/or modified sequence from HRSV(Memphis-37)__AIY60641.1__M2-1 (opt5)
gggagacccgugacccggaaguuguacggcuacgcgacuuucccucccacaaacccucgcgcccuuccuuuccuacuugggcccggcagaaagcuuaccaugagcagacggaaccccugcaaguucgagauccgcggccacugucugaaugggaaaagaugccauuuuucccacaacuacuucgaauggccuccgcaugcccuccuggugcggcagaauuuuaugcuuaaccgcauucugaagucuauggacaaaagcaucgauacccucuccgagauuucuggagcugccgaacuggacagaacagaggaauaugcgcuuggcgucguuggggugcuggagagcuacaucggauccauuaauaacaucacgaagcaaucugcuuguguggccaugagcaaacuccugaccgagcucaauuccgaugacaucaagaagcugcgggauaacgaggaacccaauagcccuaaaauucgcgucuauaacacagugaucucuuacauugaauccaauagaaagaacaauaaacagaccauccaucugcuuaagcggcugcccgccgacguucucaaaaagacaauuaagaacacccuggauauccacaaaagcauuacaaucaauaacccuaaggagucuaccgugaacgacacgaaugaucacgcuaaaaacaaugacaccacaugaggacuaguguccaccugucccuccugggcugcuggauugucucguuuuccugccaaauaaacaggaucagcgcuuuacagaucuaaaaaaaaaaaaaaaaaaaaaaaaaaaaaaaaaaaaaaaaaaaaaaaaaaaaaaaaaaaaaaaaugcaucccccccccccccccccccccccccccccccaaaggcucuuuucagagccaccagaauu

SEQ ID NO: 21134 - RNA, 896 nt, Artificial Sequence
  mRNA product Design e-2 comprising derived and/or modified sequence from HRSV(Memphis-37)__AIY60641.1__M2-1 (opt6)
gggagacccgugacccggaaguuguacggcuacgcgacuuucccucccacaaacccucgcgcccuuccuuuccuacuugggcccggcagaaagcuuaccauguccagacgaaacccaugcaaauucgaaauaagaggacacugccuaaacggaaaaagaugccacuucucacacaacuacuucgaauggccaccacacgcacuccucguaagacaaaacuucaugcuaaacagaauacuaaaaucaauggacaaaucaauagacacacucucagaaauaucaggagcagcagaacuagaccgaacagaagaauacgcacuaggaguaguaggaguacuagaauccuacauaggaucaauaaacaacauaacaaaacaaucagcaugcguagcaaugucaaaacuacuaacagaauuaaacucagacgacauaaaaaaacuaagagacaacgaagaaccaaacucaccaaaaauaagaguauacaacaccguaauaucauacauagaaucaaacagaaaaaacaacaaacaaacaauacaccuacuaaaaagacuaccagcagacguccuaaaaaaaacaauaaaaaacacacucgacauacacaaaucaauaaccauaaacaacccaaaagaaucaacaguaaacgacaccaacgaccacgcaaaaaacaaugacacaacauaaggacuaguguccaccugucccuccugggcugcuggauugucucguuuuccugccaaauaaacaggaucagcgcuuuacagaucuaaaaaaaaaaaaaaaaaaaaaaaaaaaaaaaaaaaaaaaaaaaaaaaaaaaaaaaaaaaaaaaaugcaucccccccccccccccccccccccccccccccaaaggcucuuuucagagccaccagaauu

SEQ ID NO: 21135 - RNA, 896 nt, Artificial Sequence
  mRNA product Design e-2 comprising derived and/or modified sequence from HRSV(Memphis-37)__AIY60641.1__M2-1 (opt11)
gggagacccgugacccggaaguuguacggcuacgcgacuuucccucccacaaacccucgcgcccuuccuuuccuacuugggcccggcagaaagcuuaccaugucccgacgcaaccccugcaaauucgaaauccgaggccacugccucaacggcaaacgcugccacuucucccacaacuacuucgaauggcccccccacgcccuccucguacgccaaaacuucaugcucaaccgaauccucaagucaauggacaaauccaucgacacccucuccgaaaucuccggcgccgccgaacucgaccgcaccgaagaauacgcccucggcgucgucggcguccucgaauccuacaucggcuccaucaacaacaucaccaaacaauccgccugcgucgccauguccaaacuccucaccgaacucaacuccgacgacaucaaaaaacuccgcgacaacgaagaacccaacucccccaaaauccgcgucuacaacaccguuaucuccuacaucgaauccaaccgaaaaaacaacaaacaaaccauccaccuccucaaacgacuccccgccgacguccucaaaaaaaccaucaaaaauacccuagacauccacaaauccaucaccaucaacaaccccaaagaauccaccgucaacgacaccaacgaccacgccaaaaacaacgacaccaccuaaggacuaguguccaccugucccuccugggcugcuggauugucucguuuuccugccaaauaaacaggaucagcgcuuuacagaucuaaaaaaaaaaaaaaaaaaaaaaaaaaaaaaaaaaaaaaaaaaaaaaaaaaaaaaaaaaaaaaaaugcaucccccccccccccccccccccccccccccccaaaggcucuuuucagagccaccagaauu

SEQ ID NO: 21136 - RNA, 866 nt, Artificial Sequence
  mRNA product Design e-3 comprising derived and/or modified sequence from HRSV(Memphis-37)__AIY60641.1__M2-1 (wt)
gggagacuuucccauucuguagcagaauuugguguugccuguggucuuggucccgcggagaagcuuaccaugucacgaaggaauccuugcaaauuugaaauucgaggucauugcuugaaugguaagaggugucauuuuagucauaauuauuuugaauggccaccccaugcacugcuuguaagacaaaacuuuauguuaaacagaauacuuaagucuauggauaaaagcauagauacuuuaucagaaauaaguggagcugcagaguuggacagaacugaagaguaugcccucgguguaguuggagugcuagagaguuauauaggaucaauaaauaauauaacuaaacaaucagcauguguugccaugagcaaacuccucacugaacucaacagugaugacaucaaaaaacuaagagauaaugaagagccaaauucaccuaagauaagaguguacaauacugucauaucauauauugaaagcaacaggaaaaacaauaaacaaacuauccaucuguuaaaaagauugccagcagacguauugaagaaaaccaucaaaaacacauuggauauccacaagagcauaaccaucaacaacccaaaagaaucaacuguuaaugauacaaaugaccaugccaaaaauaaugauacuaccugaggacuaguguccaccugucccuccugggcugcuggauugucucguuuuccugccaaauaaacaggaucagcgcuuuacagaucuaaaaaaaaaaaaaaaaaaaaaaaaaaaaaaaaaaaaaaaaaaaaaaaaaaaaaaaaaaaaaaaaugcaucccccccccccccccccccccccccccccccaaaggcucuuuucagagccaccagaauu

SEQ ID NO: 21137 - RNA, 866 nt, Artificial Sequence
  mRNA product Design e-3 comprising derived and/or modified sequence from HRSV(Memphis-37)__AIY60641.1__M2-1 (opt1)
gggagacuuucccauucuguagcagaauuugguguugccuguggucuuggucccgcggagaagcuuaccaugagccgccggaaccccugcaaguucgagauccgcggccacugccugaacgggaagcggugccacuucucccacaacuacuucgaguggccgccccacgcccuccuggugcgccagaacuucaugcugaaccggauccucaagagcauggacaaguccaucgacacccugagcgagaucuccggcgccgcggagcuggaccgcaccgaggaguacgcccucggggucgugggcgugcuggagagcuacaucggguccaucaacaacaucacgaagcagagcgccugcgucgccauguccaagcugcucaccgagcugaacagcgacgacaucaagaagcugcgggacaacgaggagcccaacucccccaagauccgcguguacaacaccgugaucagcuacaucgaguccaaccggaagaacaacaagcagaccauccaccuccugaagcgccugccggccgacguccucaagaagacgaucaagaacacccuggacauccacaagagcaucaccaucaacaaccccaaggaguccaccgugaacgacacgaacgaccacgcgaagaacaacgacaccaccugaggacuaguguccaccugucccuccugggcugcuggauugucucguuuuccugccaaauaaacaggaucagcgcuuuacagaucuaaaaaaaaaaaaaaaaaaaaaaaaaaaaaaaaaaaaaaaaaaaaaaaaaaaaaaaaaaaaaaaaugcaucccccccccccccccccccccccccccccccaaaggcucuuuucagagccaccagaauu

SEQ ID NO: 21138 - RNA, 866 nt, Artificial Sequence
  mRNA product Design e-3 comprising derived and/or modified sequence from HRSV(Memphis-37)__AIY60641.1__M2-1 (opt2)
gggagacuuucccauucuguagcagaauuugguguugccuguggucuuggucccgcggagaagcuuaccaugucccgccgcaaccccugcaaguucgagauccgcggccacugccucaacggcaagcgcugccacuucucccacaacuacuucgaguggcccccccacgcccuccucguccgccagaacuucaugcucaaccgcauccucaaguccauggacaaguccaucgacacccucuccgagaucuccggcgccgccgagcucgaccgcaccgaggaguacgcccucggcgucgucggcguccucgaguccuacaucggcuccaucaacaacaucaccaagcaguccgccugcgucgccauguccaagcuccucaccgagcucaacuccgacgacaucaagaagcuccgcgacaacgaggagcccaacucccccaagauccgcgucuacaacaccgucaucuccuacaucgaguccaaccgcaagaacaacaagcagaccauccaccuccucaagcgccuccccgccgacguccucaagaagaccaucaagaacacccucgacauccacaaguccaucaccaucaacaaccccaaggaguccaccgucaacgacaccaacgaccacgccaagaacaacgacaccaccugaggacuaguguccaccugucccuccugggcugcuggauugucucguuuuccugccaaauaaacaggaucagcgcuuuacagaucuaaaaaaaaaaaaaaaaaaaaaaaaaaaaaaaaaaaaaaaaaaaaaaaaaaaaaaaaaaaaaaaaugcaucccccccccccccccccccccccccccccccaaaggcucuuuucagagccaccagaauu

SEQ ID NO: 21139 - RNA, 866 nt, Artificial Sequence
  mRNA product Design e-3 comprising derived and/or modified sequence from HRSV(Memphis-37)__AIY60641.1__M2-1 (opt3)
gggagacuuucccauucuguagcagaauuugguguugccuguggucuuggucccgcggagaagcuuaccaugagcagaaggaaccccugcaaguucgagauccggggccacugucugaaugggaaacgcugccauuuuucccacaacuacuucgaauggccuccacaugcacuccuugugcgacagaauuuuaugcugaaccguauuuugaagucuauggacaaaucaauagauaccuuaagugagaucagcggagcugcagaacuggacagaacagaggaauaugcccuaggugucguuggcgugcucgaguccuacauugggucuaucaauaacauuacuaagcaaucggcguguguagcuaugucaaaacugcuuacggagcugaauagcgaugacaucaagaaguugagggauaacgaggaaccgaauagucccaaaauacggguguauaacaccgucaucuccuacauugaaucuaaucgcaagaacaauaaacagacaauccaccuccugaagagacugccugccgacgugcucaaaaagacuauuaagaacaccuuagauauccauaaaagcauaacaauuaauaacccaaaggaguccaccguuaacgacacuaaugaucacgccaaaaacaaugacacaaccugaggacuaguguccaccugucccuccugggcugcuggauugucucguuuuccugccaaauaaacaggaucagcgcuuuacagaucuaaaaaaaaaaaaaaaaaaaaaaaaaaaaaaaaaaaaaaaaaaaaaaaaaaaaaaaaaaaaaaaaugcaucccccccccccccccccccccccccccccccaaaggcucuuuucagagccaccagaauu

SEQ ID NO: 21140 - RNA, 866 nt, Artificial Sequence
  mRNA product Design e-3 comprising derived and/or modified sequence from HRSV(Memphis-37)__AIY60641.1__M2-1 (opt4)
gggagacuuucccauucuguagcagaauuugguguugccuguggucuuggucccgcggagaagcuuaccaugagcagaagaaaccccugcaaguucgagaucagaggccacugccugaacggcaagagaugccacuucagccacaacuacuucgaguggcccccccacgcccugcuggugagacagaacuucaugcugaacagaauccugaagagcauggacaagagcaucgacacccugagcgagaucagcggcgccgccgagcuggacagaaccgaggaguacgcccugggcguggugggcgugcuggagagcuacaucggcagcaucaacaacaucaccaagcagagcgccugcguggccaugagcaagcugcugaccgagcugaacagcgacgacaucaagaagcugagagacaacgaggagcccaacagccccaagaucagaguguacaacaccgugaucagcuacaucgagagcaacagaaagaacaacaagcagaccauccaccugcugaagagacugcccgccgacgugcugaagaagaccaucaagaacacccuggacauccacaagagcaucaccaucaacaaccccaaggagagcaccgugaacgacaccaacgaccacgccaagaacaacgacaccaccugaggacuaguguccaccugucccuccugggcugcuggauugucucguuuuccugccaaauaaacaggaucagcgcuuuacagaucuaaaaaaaaaaaaaaaaaaaaaaaaaaaaaaaaaaaaaaaaaaaaaaaaaaaaaaaaaaaaaaaaugcaucccccccccccccccccccccccccccccccaaaggcucuuuucagagccaccagaauu

SEQ ID NO: 21141 - RNA, 866 nt, Artificial Sequence
  mRNA product Design e-3 comprising derived and/or modified sequence from HRSV(Memphis-37)__AIY60641.1__M2-1 (opt5)
gggagacuuucccauucuguagcagaauuugguguugccuguggucuuggucccgcggagaagcuuaccaugagcagacggaaccccugcaaguucgagauccgcggccacugucugaaugggaaaagaugccauuuuucccacaacuacuucgaauggccuccgcaugcccuccuggugcggcagaauuuuaugcuuaaccgcauucugaagucuauggacaaaagcaucgauacccucuccgagauuucuggagcugccgaacuggacagaacagaggaauaugcgcuuggcgucguuggggugcuggagagcuacaucggauccauuaauaacaucacgaagcaaucugcuuguguggccaugagcaaacuccugaccgagcucaauuccgaugacaucaagaagcugcgggauaacgaggaacccaauagcccuaaaauucgcgucuauaacacagugaucucuuacauugaauccaauagaaagaacaauaaacagaccauccaucugcuuaagcggcugcccgccgacguucucaaaaagacaauuaagaacacccuggauauccacaaaagcauuacaaucaauaacccuaaggagucuaccgugaacgacacgaaugaucacgcuaaaaacaaugacaccacaugaggacuaguguccaccugucccuccugggcugcuggauugucucguuuuccugccaaauaaacaggaucagcgcuuuacagaucuaaaaaaaaaaaaaaaaaaaaaaaaaaaaaaaaaaaaaaaaaaaaaaaaaaaaaaaaaaaaaaaaugcaucccccccccccccccccccccccccccccccaaaggcucuuuucagagccaccagaauu

SEQ ID NO: 21142 - RNA, 866 nt, Artificial Sequence
  mRNA product Design e-3 comprising derived and/or modified sequence from HRSV(Memphis-37)__AIY60641.1__M2-1 (opt6)
gggagacuuucccauucuguagcagaauuugguguugccuguggucuuggucccgcggagaagcuuaccauguccagacgaaacccaugcaaauucgaaauaagaggacacugccuaaacggaaaaagaugccacuucucacacaacuacuucgaauggccaccacacgcacuccucguaagacaaaacuucaugcuaaacagaauacuaaaaucaauggacaaaucaauagacacacucucagaaauaucaggagcagcagaacuagaccgaacagaagaauacgcacuaggaguaguaggaguacuagaauccuacauaggaucaauaaacaacauaacaaaacaaucagcaugcguagcaaugucaaaacuacuaacagaauuaaacucagacgacauaaaaaaacuaagagacaacgaagaaccaaacucaccaaaaauaagaguauacaacaccguaauaucauacauagaaucaaacagaaaaaacaacaaacaaacaauacaccuacuaaaaagacuaccagcagacguccuaaaaaaaacaauaaaaaacacacucgacauacacaaaucaauaaccauaaacaacccaaaagaaucaacaguaaacgacaccaacgaccacgcaaaaaacaaugacacaacauaaggacuaguguccaccugucccuccugggcugcuggauugucucguuuuccugccaaauaaacaggaucagcgcuuuacagaucuaaaaaaaaaaaaaaaaaaaaaaaaaaaaaaaaaaaaaaaaaaaaaaaaaaaaaaaaaaaaaaaaugcaucccccccccccccccccccccccccccccccaaaggcucuuuucagagccaccagaauu

SEQ ID NO: 21143 - RNA, 866 nt, Artificial Sequence
  mRNA product Design e-3 comprising derived and/or modified sequence from HRSV(Memphis-37)__AIY60641.1__M2-1 (opt11)
gggagacuuucccauucuguagcagaauuugguguugccuguggucuuggucccgcggagaagcuuaccaugucccgacgcaaccccugcaaauucgaaauccgaggccacugccucaacggcaaacgcugccacuucucccacaacuacuucgaauggcccccccacgcccuccucguacgccaaaacuucaugcucaaccgaauccucaagucaauggacaaauccaucgacacccucuccgaaaucuccggcgccgccgaacucgaccgcaccgaagaauacgcccucggcgucgucggcguccucgaauccuacaucggcuccaucaacaacaucaccaaacaauccgccugcgucgccauguccaaacuccucaccgaacucaacuccgacgacaucaaaaaacuccgcgacaacgaagaacccaacucccccaaaauccgcgucuacaacaccguuaucuccuacaucgaauccaaccgaaaaaacaacaaacaaaccauccaccuccucaaacgacuccccgccgacguccucaaaaaaaccaucaaaaauacccuagacauccacaaauccaucaccaucaacaaccccaaagaauccaccgucaacgacaccaacgaccacgccaaaaacaacgacaccaccuaaggacuaguguccaccugucccuccugggcugcuggauugucucguuuuccugccaaauaaacaggaucagcgcuuuacagaucuaaaaaaaaaaaaaaaaaaaaaaaaaaaaaaaaaaaaaaaaaaaaaaaaaaaaaaaaaaaaaaaaugcaucccccccccccccccccccccccccccccccaaaggcucuuuucagagccaccagaauu

SEQ ID NO: 21144 - RNA, 920 nt, Artificial Sequence
  mRNA product Design e-4 comprising derived and/or modified sequence from HRSV(Memphis-37)__AIY60641.1__M2-1 (wt)
gggagacuccugucgggcggaaguaggaggaguagaguuuaaaaacaguacucuuuuuccgguucgggacguaguugaagcaacgacaagccggauaaccgcucuugagacaggaagcuuaccaugucacgaaggaauccuugcaaauuugaaauucgaggucauugcuugaaugguaagaggugucauuuuagucauaauuauuuugaauggccaccccaugcacugcuuguaagacaaaacuuuauguuaaacagaauacuuaagucuauggauaaaagcauagauacuuuaucagaaauaaguggagcugcagaguuggacagaacugaagaguaugcccucgguguaguuggagugcuagagaguuauauaggaucaauaaauaauauaacuaaacaaucagcauguguugccaugagcaaacuccucacugaacucaacagugaugacaucaaaaaacuaagagauaaugaagagccaaauucaccuaagauaagaguguacaauacugucauaucauauauugaaagcaacaggaaaaacaauaaacaaacuauccaucuguuaaaaagauugccagcagacguauugaagaaaaccaucaaaaacacauuggauauccacaagagcauaaccaucaacaacccaaaagaaucaacuguuaaugauacaaaugaccaugccaaaaauaaugauacuaccugaggacuaguguccaccugucccuccugggcugcuggauugucucguuuuccugccaaauaaacaggaucagcgcuuuacagaucuaaaaaaaaaaaaaaaaaaaaaaaaaaaaaaaaaaaaaaaaaaaaaaaaaaaaaaaaaaaaaaaaugcaucccccccccccccccccccccccccccccccaaaggcucuuuucagagccaccagaauu

SEQ ID NO: 21145 - RNA, 920 nt, Artificial Sequence
  mRNA product Design e-4 comprising derived and/or modified sequence from HRSV(Memphis-37)__AIY60641.1__M2-1 (opt1)
gggagacuccugucgggcggaaguaggaggaguagaguuuaaaaacaguacucuuuuuccgguucgggacguaguugaagcaacgacaagccggauaaccgcucuugagacaggaagcuuaccaugagccgccggaaccccugcaaguucgagauccgcggccacugccugaacgggaagcggugccacuucucccacaacuacuucgaguggccgccccacgcccuccuggugcgccagaacuucaugcugaaccggauccucaagagcauggacaaguccaucgacacccugagcgagaucuccggcgccgcggagcuggaccgcaccgaggaguacgcccucggggucgugggcgugcuggagagcuacaucggguccaucaacaacaucacgaagcagagcgccugcgucgccauguccaagcugcucaccgagcugaacagcgacgacaucaagaagcugcgggacaacgaggagcccaacucccccaagauccgcguguacaacaccgugaucagcuacaucgaguccaaccggaagaacaacaagcagaccauccaccuccugaagcgccugccggccgacguccucaagaagacgaucaagaacacccuggacauccacaagagcaucaccaucaacaaccccaaggaguccaccgugaacgacacgaacgaccacgcgaagaacaacgacaccaccugaggacuaguguccaccugucccuccugggcugcuggauugucucguuuuccugccaaauaaacaggaucagcgcuuuacagaucuaaaaaaaaaaaaaaaaaaaaaaaaaaaaaaaaaaaaaaaaaaaaaaaaaaaaaaaaaaaaaaaaugcaucccccccccccccccccccccccccccccccaaaggcucuuuucagagccaccagaauu

SEQ ID NO: 21146 - RNA, 920 nt, Artificial Sequence
  mRNA product Design e-4 comprising derived and/or modified sequence from HRSV(Memphis-37)__AIY60641.1__M2-1 (opt2)
gggagacuccugucgggcggaaguaggaggaguagaguuuaaaaacaguacucuuuuuccgguucgggacguaguugaagcaacgacaagccggauaaccgcucuugagacaggaagcuuaccaugucccgccgcaaccccugcaaguucgagauccgcggccacugccucaacggcaagcgcugccacuucucccacaacuacuucgaguggcccccccacgcccuccucguccgccagaacuucaugcucaaccgcauccucaaguccauggacaaguccaucgacacccucuccgagaucuccggcgccgccgagcucgaccgcaccgaggaguacgcccucggcgucgucggcguccucgaguccuacaucggcuccaucaacaacaucaccaagcaguccgccugcgucgccauguccaagcuccucaccgagcucaacuccgacgacaucaagaagcuccgcgacaacgaggagcccaacucccccaagauccgcgucuacaacaccgucaucuccuacaucgaguccaaccgcaagaacaacaagcagaccauccaccuccucaagcgccuccccgccgacguccucaagaagaccaucaagaacacccucgacauccacaaguccaucaccaucaacaaccccaaggaguccaccgucaacgacaccaacgaccacgccaagaacaacgacaccaccugaggacuaguguccaccugucccuccugggcugcuggauugucucguuuuccugccaaauaaacaggaucagcgcuuuacagaucuaaaaaaaaaaaaaaaaaaaaaaaaaaaaaaaaaaaaaaaaaaaaaaaaaaaaaaaaaaaaaaaaugcaucccccccccccccccccccccccccccccccaaaggcucuuuucagagccaccagaauu

SEQ ID NO: 21147 - RNA, 920 nt, Artificial Sequence
  mRNA product Design e-4 comprising derived and/or modified sequence from HRSV(Memphis-37)__AIY60641.1__M2-1 (opt3)
gggagacuccugucgggcggaaguaggaggaguagaguuuaaaaacaguacucuuuuuccgguucgggacguaguugaagcaacgacaagccggauaaccgcucuugagacaggaagcuuaccaugagcagaaggaaccccugcaaguucgagauccggggccacugucugaaugggaaacgcugccauuuuucccacaacuacuucgaauggccuccacaugcacuccuugugcgacagaauuuuaugcugaaccguauuuugaagucuauggacaaaucaauagauaccuuaagugagaucagcggagcugcagaacuggacagaacagaggaauaugcccuaggugucguuggcgugcucgaguccuacauugggucuaucaauaacauuacuaagcaaucggcguguguagcuaugucaaaacugcuuacggagcugaauagcgaugacaucaagaaguugagggauaacgaggaaccgaauagucccaaaauacggguguauaacaccgucaucuccuacauugaaucuaaucgcaagaacaauaaacagacaauccaccuccugaagagacugccugccgacgugcucaaaaagacuauuaagaacaccuuagauauccauaaaagcauaacaauuaauaacccaaaggaguccaccguuaacgacacuaaugaucacgccaaaaacaaugacacaaccugaggacuaguguccaccugucccuccugggcugcuggauugucucguuuuccugccaaauaaacaggaucagcgcuuuacagaucuaaaaaaaaaaaaaaaaaaaaaaaaaaaaaaaaaaaaaaaaaaaaaaaaaaaaaaaaaaaaaaaaugcaucccccccccccccccccccccccccccccccaaaggcucuuuucagagccaccagaauu

SEQ ID NO: 21148 - RNA, 920 nt, Artificial Sequence
  mRNA product Design e-4 comprising derived and/or modified sequence from HRSV(Memphis-37)__AIY60641.1__M2-1 (opt4)
gggagacuccugucgggcggaaguaggaggaguagaguuuaaaaacaguacucuuuuuccgguucgggacguaguugaagcaacgacaagccggauaaccgcucuugagacaggaagcuuaccaugagcagaagaaaccccugcaaguucgagaucagaggccacugccugaacggcaagagaugccacuucagccacaacuacuucgaguggcccccccacgcccugcuggugagacagaacuucaugcugaacagaauccugaagagcauggacaagagcaucgacacccugagcgagaucagcggcgccgccgagcuggacagaaccgaggaguacgcccugggcguggugggcgugcuggagagcuacaucggcagcaucaacaacaucaccaagcagagcgccugcguggccaugagcaagcugcugaccgagcugaacagcgacgacaucaagaagcugagagacaacgaggagcccaacagccccaagaucagaguguacaacaccgugaucagcuacaucgagagcaacagaaagaacaacaagcagaccauccaccugcugaagagacugcccgccgacgugcugaagaagaccaucaagaacacccuggacauccacaagagcaucaccaucaacaaccccaaggagagcaccgugaacgacaccaacgaccacgccaagaacaacgacaccaccugaggacuaguguccaccugucccuccugggcugcuggauugucucguuuuccugccaaauaaacaggaucagcgcuuuacagaucuaaaaaaaaaaaaaaaaaaaaaaaaaaaaaaaaaaaaaaaaaaaaaaaaaaaaaaaaaaaaaaaaugcaucccccccccccccccccccccccccccccccaaaggcucuuuucagagccaccagaauu

SEQ ID NO: 21149 - RNA, 920 nt, Artificial Sequence
  mRNA product Design e-4 comprising derived and/or modified sequence from HRSV(Memphis-37)__AIY60641.1__M2-1 (opt5)
gggagacuccugucgggcggaaguaggaggaguagaguuuaaaaacaguacucuuuuuccgguucgggacguaguugaagcaacgacaagccggauaaccgcucuugagacaggaagcuuaccaugagcagacggaaccccugcaaguucgagauccgcggccacugucugaaugggaaaagaugccauuuuucccacaacuacuucgaauggccuccgcaugcccuccuggugcggcagaauuuuaugcuuaaccgcauucugaagucuauggacaaaagcaucgauacccucuccgagauuucuggagcugccgaacuggacagaacagaggaauaugcgcuuggcgucguuggggugcuggagagcuacaucggauccauuaauaacaucacgaagcaaucugcuuguguggccaugagcaaacuccugaccgagcucaauuccgaugacaucaagaagcugcgggauaacgaggaacccaauagcccuaaaauucgcgucuauaacacagugaucucuuacauugaauccaauagaaagaacaauaaacagaccauccaucugcuuaagcggcugcccgccgacguucucaaaaagacaauuaagaacacccuggauauccacaaaagcauuacaaucaauaacccuaaggagucuaccgugaacgacacgaaugaucacgcuaaaaacaaugacaccacaugaggacuaguguccaccugucccuccugggcugcuggauugucucguuuuccugccaaauaaacaggaucagcgcuuuacagaucuaaaaaaaaaaaaaaaaaaaaaaaaaaaaaaaaaaaaaaaaaaaaaaaaaaaaaaaaaaaaaaaaugcaucccccccccccccccccccccccccccccccaaaggcucuuuucagagccaccagaauu

SEQ ID NO: 21150 - RNA, 920 nt, Artificial Sequence
  mRNA product Design e-4 comprising derived and/or modified sequence from HRSV(Memphis-37)__AIY60641.1__M2-1 (opt6)
gggagacuccugucgggcggaaguaggaggaguagaguuuaaaaacaguacucuuuuuccgguucgggacguaguugaagcaacgacaagccggauaaccgcucuugagacaggaagcuuaccauguccagacgaaacccaugcaaauucgaaauaagaggacacugccuaaacggaaaaagaugccacuucucacacaacuacuucgaauggccaccacacgcacuccucguaagacaaaacuucaugcuaaacagaauacuaaaaucaauggacaaaucaauagacacacucucagaaauaucaggagcagcagaacuagaccgaacagaagaauacgcacuaggaguaguaggaguacuagaauccuacauaggaucaauaaacaacauaacaaaacaaucagcaugcguagcaaugucaaaacuacuaacagaauuaaacucagacgacauaaaaaaacuaagagacaacgaagaaccaaacucaccaaaaauaagaguauacaacaccguaauaucauacauagaaucaaacagaaaaaacaacaaacaaacaauacaccuacuaaaaagacuaccagcagacguccuaaaaaaaacaauaaaaaacacacucgacauacacaaaucaauaaccauaaacaacccaaaagaaucaacaguaaacgacaccaacgaccacgcaaaaaacaaugacacaacauaaggacuaguguccaccugucccuccugggcugcuggauugucucguuuuccugccaaauaaacaggaucagcgcuuuacagaucuaaaaaaaaaaaaaaaaaaaaaaaaaaaaaaaaaaaaaaaaaaaaaaaaaaaaaaaaaaaaaaaaugcaucccccccccccccccccccccccccccccccaaaggcucuuuucagagccaccagaauu

SEQ ID NO: 21151 - RNA, 920 nt, Artificial Sequence
  mRNA product Design e-4 comprising derived and/or modified sequence from HRSV(Memphis-37)__AIY60641.1__M2-1 (opt11)
gggagacuccugucgggcggaaguaggaggaguagaguuuaaaaacaguacucuuuuuccgguucgggacguaguugaagcaacgacaagccggauaaccgcucuugagacaggaagcuuaccaugucccgacgcaaccccugcaaauucgaaauccgaggccacugccucaacggcaaacgcugccacuucucccacaacuacuucgaauggcccccccacgcccuccucguacgccaaaacuucaugcucaaccgaauccucaagucaauggacaaauccaucgacacccucuccgaaaucuccggcgccgccgaacucgaccgcaccgaagaauacgcccucggcgucgucggcguccucgaauccuacaucggcuccaucaacaacaucaccaaacaauccgccugcgucgccauguccaaacuccucaccgaacucaacuccgacgacaucaaaaaacuccgcgacaacgaagaacccaacucccccaaaauccgcgucuacaacaccguuaucuccuacaucgaauccaaccgaaaaaacaacaaacaaaccauccaccuccucaaacgacuccccgccgacguccucaaaaaaaccaucaaaaauacccuagacauccacaaauccaucaccaucaacaaccccaaagaauccaccgucaacgacaccaacgaccacgccaaaaacaacgacaccaccuaaggacuaguguccaccugucccuccugggcugcuggauugucucguuuuccugccaaauaaacaggaucagcgcuuuacagaucuaaaaaaaaaaaaaaaaaaaaaaaaaaaaaaaaaaaaaaaaaaaaaaaaaaaaaaaaaaaaaaaaugcaucccccccccccccccccccccccccccccccaaaggcucuuuucagagccaccagaauu

SEQ ID NO: 21152 - RNA, 887 nt, Artificial Sequence
  mRNA product Design e-5 comprising derived and/or modified sequence from HRSV(Memphis-37)__AIY60641.1__M2-1 (wt)
gggagagcggcucggccauuuugucccagucaguccggaggcugcggcugcagaaguaccgccugcggaguaacugcaaagaagcuuaccaugucacgaaggaauccuugcaaauuugaaauucgaggucauugcuugaaugguaagaggugucauuuuagucauaauuauuuugaauggccaccccaugcacugcuuguaagacaaaacuuuauguuaaacagaauacuuaagucuauggauaaaagcauagauacuuuaucagaaauaaguggagcugcagaguuggacagaacugaagaguaugcccucgguguaguuggagugcuagagaguuauauaggaucaauaaauaauauaacuaaacaaucagcauguguugccaugagcaaacuccucacugaacucaacagugaugacaucaaaaaacuaagagauaaugaagagccaaauucaccuaagauaagaguguacaauacugucauaucauauauugaaagcaacaggaaaaacaauaaacaaacuauccaucuguuaaaaagauugccagcagacguauugaagaaaaccaucaaaaacacauuggauauccacaagagcauaaccaucaacaacccaaaagaaucaacuguuaaugauacaaaugaccaugccaaaaauaaugauacuaccugaggacuaguguccaccugucccuccugggcugcuggauugucucguuuuccugccaaauaaacaggaucagcgcuuuacagaucuaaaaaaaaaaaaaaaaaaaaaaaaaaaaaaaaaaaaaaaaaaaaaaaaaaaaaaaaaaaaaaaaugcaucccccccccccccccccccccccccccccccaaaggcucuuuucagagccaccagaauu

SEQ ID NO: 21153 - RNA, 887 nt, Artificial Sequence
  mRNA product Design e-5 comprising derived and/or modified sequence from HRSV(Memphis-37)__AIY60641.1__M2-1 (opt1)
gggagagcggcucggccauuuugucccagucaguccggaggcugcggcugcagaaguaccgccugcggaguaacugcaaagaagcuuaccaugagccgccggaaccccugcaaguucgagauccgcggccacugccugaacgggaagcggugccacuucucccacaacuacuucgaguggccgccccacgcccuccuggugcgccagaacuucaugcugaaccggauccucaagagcauggacaaguccaucgacacccugagcgagaucuccggcgccgcggagcuggaccgcaccgaggaguacgcccucggggucgugggcgugcuggagagcuacaucggguccaucaacaacaucacgaagcagagcgccugcgucgccauguccaagcugcucaccgagcugaacagcgacgacaucaagaagcugcgggacaacgaggagcccaacucccccaagauccgcguguacaacaccgugaucagcuacaucgaguccaaccggaagaacaacaagcagaccauccaccuccugaagcgccugccggccgacguccucaagaagacgaucaagaacacccuggacauccacaagagcaucaccaucaacaaccccaaggaguccaccgugaacgacacgaacgaccacgcgaagaacaacgacaccaccugaggacuaguguccaccugucccuccugggcugcuggauugucucguuuuccugccaaauaaacaggaucagcgcuuuacagaucuaaaaaaaaaaaaaaaaaaaaaaaaaaaaaaaaaaaaaaaaaaaaaaaaaaaaaaaaaaaaaaaaugcaucccccccccccccccccccccccccccccccaaaggcucuuuucagagccaccagaauu

SEQ ID NO: 21154 - RNA, 887 nt, Artificial Sequence
  mRNA product Design e-5 comprising derived and/or modified sequence from HRSV(Memphis-37)__AIY60641.1__M2-1 (opt2)
gggagagcggcucggccauuuugucccagucaguccggaggcugcggcugcagaaguaccgccugcggaguaacugcaaagaagcuuaccaugucccgccgcaaccccugcaaguucgagauccgcggccacugccucaacggcaagcgcugccacuucucccacaacuacuucgaguggcccccccacgcccuccucguccgccagaacuucaugcucaaccgcauccucaaguccauggacaaguccaucgacacccucuccgagaucuccggcgccgccgagcucgaccgcaccgaggaguacgcccucggcgucgucggcguccucgaguccuacaucggcuccaucaacaacaucaccaagcaguccgccugcgucgccauguccaagcuccucaccgagcucaacuccgacgacaucaagaagcuccgcgacaacgaggagcccaacucccccaagauccgcgucuacaacaccgucaucuccuacaucgaguccaaccgcaagaacaacaagcagaccauccaccuccucaagcgccuccccgccgacguccucaagaagaccaucaagaacacccucgacauccacaaguccaucaccaucaacaaccccaaggaguccaccgucaacgacaccaacgaccacgccaagaacaacgacaccaccugaggacuaguguccaccugucccuccugggcugcuggauugucucguuuuccugccaaauaaacaggaucagcgcuuuacagaucuaaaaaaaaaaaaaaaaaaaaaaaaaaaaaaaaaaaaaaaaaaaaaaaaaaaaaaaaaaaaaaaaugcaucccccccccccccccccccccccccccccccaaaggcucuuuucagagccaccagaauu

SEQ ID NO: 21155 - RNA, 887 nt, Artificial Sequence
  mRNA product Design e-5 comprising derived and/or modified sequence from HRSV(Memphis-37)__AIY60641.1__M2-1 (opt3)
gggagagcggcucggccauuuugucccagucaguccggaggcugcggcugcagaaguaccgccugcggaguaacugcaaagaagcuuaccaugagcagaaggaaccccugcaaguucgagauccggggccacugucugaaugggaaacgcugccauuuuucccacaacuacuucgaauggccuccacaugcacuccuugugcgacagaauuuuaugcugaaccguauuuugaagucuauggacaaaucaauagauaccuuaagugagaucagcggagcugcagaacuggacagaacagaggaauaugcccuaggugucguuggcgugcucgaguccuacauugggucuaucaauaacauuacuaagcaaucggcguguguagcuaugucaaaacugcuuacggagcugaauagcgaugacaucaagaaguugagggauaacgaggaaccgaauagucccaaaauacggguguauaacaccgucaucuccuacauugaaucuaaucgcaagaacaauaaacagacaauccaccuccugaagagacugccugccgacgugcucaaaaagacuauuaagaacaccuuagauauccauaaaagcauaacaauuaauaacccaaaggaguccaccguuaacgacacuaaugaucacgccaaaaacaaugacacaaccugaggacuaguguccaccugucccuccugggcugcuggauugucucguuuuccugccaaauaaacaggaucagcgcuuuacagaucuaaaaaaaaaaaaaaaaaaaaaaaaaaaaaaaaaaaaaaaaaaaaaaaaaaaaaaaaaaaaaaaaugcaucccccccccccccccccccccccccccccccaaaggcucuuuucagagccaccagaauu

SEQ ID NO: 21156 - RNA, 887 nt, Artificial Sequence
  mRNA product Design e-5 comprising derived and/or modified sequence from HRSV(Memphis-37)__AIY60641.1__M2-1 (opt4)
gggagagcggcucggccauuuugucccagucaguccggaggcugcggcugcagaaguaccgccugcggaguaacugcaaagaagcuuaccaugagcagaagaaaccccugcaaguucgagaucagaggccacugccugaacggcaagagaugccacuucagccacaacuacuucgaguggcccccccacgcccugcuggugagacagaacuucaugcugaacagaauccugaagagcauggacaagagcaucgacacccugagcgagaucagcggcgccgccgagcuggacagaaccgaggaguacgcccugggcguggugggcgugcuggagagcuacaucggcagcaucaacaacaucaccaagcagagcgccugcguggccaugagcaagcugcugaccgagcugaacagcgacgacaucaagaagcugagagacaacgaggagcccaacagccccaagaucagaguguacaacaccgugaucagcuacaucgagagcaacagaaagaacaacaagcagaccauccaccugcugaagagacugcccgccgacgugcugaagaagaccaucaagaacacccuggacauccacaagagcaucaccaucaacaaccccaaggagagcaccgugaacgacaccaacgaccacgccaagaacaacgacaccaccugaggacuaguguccaccugucccuccugggcugcuggauugucucguuuuccugccaaauaaacaggaucagcgcuuuacagaucuaaaaaaaaaaaaaaaaaaaaaaaaaaaaaaaaaaaaaaaaaaaaaaaaaaaaaaaaaaaaaaaaugcaucccccccccccccccccccccccccccccccaaaggcucuuuucagagccaccagaauu

SEQ ID NO: 21157 - RNA, 887 nt, Artificial Sequence
  mRNA product Design e-5 comprising derived and/or modified sequence from HRSV(Memphis-37)__AIY60641.1__M2-1 (opt5)
gggagagcggcucggccauuuugucccagucaguccggaggcugcggcugcagaaguaccgccugcggaguaacugcaaagaagcuuaccaugagcagacggaaccccugcaaguucgagauccgcggccacugucugaaugggaaaagaugccauuuuucccacaacuacuucgaauggccuccgcaugcccuccuggugcggcagaauuuuaugcuuaaccgcauucugaagucuauggacaaaagcaucgauacccucuccgagauuucuggagcugccgaacuggacagaacagaggaauaugcgcuuggcgucguuggggugcuggagagcuacaucggauccauuaauaacaucacgaagcaaucugcuuguguggccaugagcaaacuccugaccgagcucaauuccgaugacaucaagaagcugcgggauaacgaggaacccaauagcccuaaaauucgcgucuauaacacagugaucucuuacauugaauccaauagaaagaacaauaaacagaccauccaucugcuuaagcggcugcccgccgacguucucaaaaagacaauuaagaacacccuggauauccacaaaagcauuacaaucaauaacccuaaggagucuaccgugaacgacacgaaugaucacgcuaaaaacaaugacaccacaugaggacuaguguccaccugucccuccugggcugcuggauugucucguuuuccugccaaauaaacaggaucagcgcuuuacagaucuaaaaaaaaaaaaaaaaaaaaaaaaaaaaaaaaaaaaaaaaaaaaaaaaaaaaaaaaaaaaaaaaugcaucccccccccccccccccccccccccccccccaaaggcucuuuucagagccaccagaauu

SEQ ID NO: 21158 - RNA, 887 nt, Artificial Sequence
  mRNA product Design e-5 comprising derived and/or modified sequence from HRSV(Memphis-37)__AIY60641.1__M2-1 (opt6)
gggagagcggcucggccauuuugucccagucaguccggaggcugcggcugcagaaguaccgccugcggaguaacugcaaagaagcuuaccauguccagacgaaacccaugcaaauucgaaauaagaggacacugccuaaacggaaaaagaugccacuucucacacaacuacuucgaauggccaccacacgcacuccucguaagacaaaacuucaugcuaaacagaauacuaaaaucaauggacaaaucaauagacacacucucagaaauaucaggagcagcagaacuagaccgaacagaagaauacgcacuaggaguaguaggaguacuagaauccuacauaggaucaauaaacaacauaacaaaacaaucagcaugcguagcaaugucaaaacuacuaacagaauuaaacucagacgacauaaaaaaacuaagagacaacgaagaaccaaacucaccaaaaauaagaguauacaacaccguaauaucauacauagaaucaaacagaaaaaacaacaaacaaacaauacaccuacuaaaaagacuaccagcagacguccuaaaaaaaacaauaaaaaacacacucgacauacacaaaucaauaaccauaaacaacccaaaagaaucaacaguaaacgacaccaacgaccacgcaaaaaacaaugacacaacauaaggacuaguguccaccugucccuccugggcugcuggauugucucguuuuccugccaaauaaacaggaucagcgcuuuacagaucuaaaaaaaaaaaaaaaaaaaaaaaaaaaaaaaaaaaaaaaaaaaaaaaaaaaaaaaaaaaaaaaaugcaucccccccccccccccccccccccccccccccaaaggcucuuuucagagccaccagaauu

SEQ ID NO: 21159 - RNA, 887 nt, Artificial Sequence
  mRNA product Design e-5 comprising derived and/or modified sequence from HRSV(Memphis-37)__AIY60641.1__M2-1 (opt11)
gggagagcggcucggccauuuugucccagucaguccggaggcugcggcugcagaaguaccgccugcggaguaacugcaaagaagcuuaccaugucccgacgcaaccccugcaaauucgaaauccgaggccacugccucaacggcaaacgcugccacuucucccacaacuacuucgaauggcccccccacgcccuccucguacgccaaaacuucaugcucaaccgaauccucaagucaauggacaaauccaucgacacccucuccgaaaucuccggcgccgccgaacucgaccgcaccgaagaauacgcccucggcgucgucggcguccucgaauccuacaucggcuccaucaacaacaucaccaaacaauccgccugcgucgccauguccaaacuccucaccgaacucaacuccgacgacaucaaaaaacuccgcgacaacgaagaacccaacucccccaaaauccgcgucuacaacaccguuaucuccuacaucgaauccaaccgaaaaaacaacaaacaaaccauccaccuccucaaacgacuccccgccgacguccucaaaaaaaccaucaaaaauacccuagacauccacaaauccaucaccaucaacaaccccaaagaauccaccgucaacgacaccaacgaccacgccaaaaacaacgacaccaccuaaggacuaguguccaccugucccuccugggcugcuggauugucucguuuuccugccaaauaaacaggaucagcgcuuuacagaucuaaaaaaaaaaaaaaaaaaaaaaaaaaaaaaaaaaaaaaaaaaaaaaaaaaaaaaaaaaaaaaaaugcaucccccccccccccccccccccccccccccccaaaggcucuuuucagagccaccagaauu

SEQ ID NO: 21160 - RNA, 954 nt, Artificial Sequence
  mRNA product Design e-6 comprising derived and/or modified sequence from HRSV(Memphis-37)__AIY60641.1__M2-1 (wt)
gggagagcggcucggccauuuugucccagucaguccggaggcugcggcugcagaaguaccgccugcggaguaacugcaaagaagcuuaccaugucacgaaggaauccuugcaaauuugaaauucgaggucauugcuugaaugguaagaggugucauuuuagucauaauuauuuugaauggccaccccaugcacugcuuguaagacaaaacuuuauguuaaacagaauacuuaagucuauggauaaaagcauagauacuuuaucagaaauaaguggagcugcagaguuggacagaacugaagaguaugcccucgguguaguuggagugcuagagaguuauauaggaucaauaaauaauauaacuaaacaaucagcauguguugccaugagcaaacuccucacugaacucaacagugaugacaucaaaaaacuaagagauaaugaagagccaaauucaccuaagauaagaguguacaauacugucauaucauauauugaaagcaacaggaaaaacaauaaacaaacuauccaucuguuaaaaagauugccagcagacguauugaagaaaaccaucaaaaacacauuggauauccacaagagcauaaccaucaacaacccaaaagaaucaacuguuaaugauacaaaugaccaugccaaaaauaaugauacuaccugaggacuaguacuggcugcaucucccuuuccucuguccuccauccuucucccaggauggugaagggggaccugguacccagugauccccaccccaggauccuaaaucaugacuuaccugcuaauaaaaacucauuggaaaagugagaagaucuaaaaaaaaaaaaaaaaaaaaaaaaaaaaaaaaaaaaaaaaaaaaaaaaaaaaaaaaaaaaaaaaugcaucccccccccccccccccccccccccccccccaaaggcucuuuucagagccaccagaauu

SEQ ID NO: 21161 - RNA, 954 nt, Artificial Sequence
  mRNA product Design e-6 comprising derived and/or modified sequence from HRSV(Memphis-37)__AIY60641.1__M2-1 (opt1)
gggagagcggcucggccauuuugucccagucaguccggaggcugcggcugcagaaguaccgccugcggaguaacugcaaagaagcuuaccaugagccgccggaaccccugcaaguucgagauccgcggccacugccugaacgggaagcggugccacuucucccacaacuacuucgaguggccgccccacgcccuccuggugcgccagaacuucaugcugaaccggauccucaagagcauggacaaguccaucgacacccugagcgagaucuccggcgccgcggagcuggaccgcaccgaggaguacgcccucggggucgugggcgugcuggagagcuacaucggguccaucaacaacaucacgaagcagagcgccugcgucgccauguccaagcugcucaccgagcugaacagcgacgacaucaagaagcugcgggacaacgaggagcccaacucccccaagauccgcguguacaacaccgugaucagcuacaucgaguccaaccggaagaacaacaagcagaccauccaccuccugaagcgccugccggccgacguccucaagaagacgaucaagaacacccuggacauccacaagagcaucaccaucaacaaccccaaggaguccaccgugaacgacacgaacgaccacgcgaagaacaacgacaccaccugaggacuaguacuggcugcaucucccuuuccucuguccuccauccuucucccaggauggugaagggggaccugguacccagugauccccaccccaggauccuaaaucaugacuuaccugcuaauaaaaacucauuggaaaagugagaagaucuaaaaaaaaaaaaaaaaaaaaaaaaaaaaaaaaaaaaaaaaaaaaaaaaaaaaaaaaaaaaaaaaugcaucccccccccccccccccccccccccccccccaaaggcucuuuucagagccaccagaauu

SEQ ID NO: 21162 - RNA, 954 nt, Artificial Sequence
  mRNA product Design e-6 comprising derived and/or modified sequence from HRSV(Memphis-37)__AIY60641.1__M2-1 (opt2)
gggagagcggcucggccauuuugucccagucaguccggaggcugcggcugcagaaguaccgccugcggaguaacugcaaagaagcuuaccaugucccgccgcaaccccugcaaguucgagauccgcggccacugccucaacggcaagcgcugccacuucucccacaacuacuucgaguggcccccccacgcccuccucguccgccagaacuucaugcucaaccgcauccucaaguccauggacaaguccaucgacacccucuccgagaucuccggcgccgccgagcucgaccgcaccgaggaguacgcccucggcgucgucggcguccucgaguccuacaucggcuccaucaacaacaucaccaagcaguccgccugcgucgccauguccaagcuccucaccgagcucaacuccgacgacaucaagaagcuccgcgacaacgaggagcccaacucccccaagauccgcgucuacaacaccgucaucuccuacaucgaguccaaccgcaagaacaacaagcagaccauccaccuccucaagcgccuccccgccgacguccucaagaagaccaucaagaacacccucgacauccacaaguccaucaccaucaacaaccccaaggaguccaccgucaacgacaccaacgaccacgccaagaacaacgacaccaccugaggacuaguacuggcugcaucucccuuuccucuguccuccauccuucucccaggauggugaagggggaccugguacccagugauccccaccccaggauccuaaaucaugacuuaccugcuaauaaaaacucauuggaaaagugagaagaucuaaaaaaaaaaaaaaaaaaaaaaaaaaaaaaaaaaaaaaaaaaaaaaaaaaaaaaaaaaaaaaaaugcaucccccccccccccccccccccccccccccccaaaggcucuuuucagagccaccagaauu

SEQ ID NO: 21163 - RNA, 954 nt, Artificial Sequence
  mRNA product Design e-6 comprising derived and/or modified sequence from HRSV(Memphis-37)__AIY60641.1__M2-1 (opt3)
gggagagcggcucggccauuuugucccagucaguccggaggcugcggcugcagaaguaccgccugcggaguaacugcaaagaagcuuaccaugagcagaaggaaccccugcaaguucgagauccggggccacugucugaaugggaaacgcugccauuuuucccacaacuacuucgaauggccuccacaugcacuccuugugcgacagaauuuuaugcugaaccguauuuugaagucuauggacaaaucaauagauaccuuaagugagaucagcggagcugcagaacuggacagaacagaggaauaugcccuaggugucguuggcgugcucgaguccuacauugggucuaucaauaacauuacuaagcaaucggcguguguagcuaugucaaaacugcuuacggagcugaauagcgaugacaucaagaaguugagggauaacgaggaaccgaauagucccaaaauacggguguauaacaccgucaucuccuacauugaaucuaaucgcaagaacaauaaacagacaauccaccuccugaagagacugccugccgacgugcucaaaaagacuauuaagaacaccuuagauauccauaaaagcauaacaauuaauaacccaaaggaguccaccguuaacgacacuaaugaucacgccaaaaacaaugacacaaccugaggacuaguacuggcugcaucucccuuuccucuguccuccauccuucucccaggauggugaagggggaccugguacccagugauccccaccccaggauccuaaaucaugacuuaccugcuaauaaaaacucauuggaaaagugagaagaucuaaaaaaaaaaaaaaaaaaaaaaaaaaaaaaaaaaaaaaaaaaaaaaaaaaaaaaaaaaaaaaaaugcaucccccccccccccccccccccccccccccccaaaggcucuuuucagagccaccagaauu

SEQ ID NO: 21164 - RNA, 954 nt, Artificial Sequence
  mRNA product Design e-6 comprising derived and/or modified sequence from HRSV(Memphis-37)__AIY60641.1__M2-1 (opt4)
gggagagcggcucggccauuuugucccagucaguccggaggcugcggcugcagaaguaccgccugcggaguaacugcaaagaagcuuaccaugagcagaagaaaccccugcaaguucgagaucagaggccacugccugaacggcaagagaugccacuucagccacaacuacuucgaguggcccccccacgcccugcuggugagacagaacuucaugcugaacagaauccugaagagcauggacaagagcaucgacacccugagcgagaucagcggcgccgccgagcuggacagaaccgaggaguacgcccugggcguggugggcgugcuggagagcuacaucggcagcaucaacaacaucaccaagcagagcgccugcguggccaugagcaagcugcugaccgagcugaacagcgacgacaucaagaagcugagagacaacgaggagcccaacagccccaagaucagaguguacaacaccgugaucagcuacaucgagagcaacagaaagaacaacaagcagaccauccaccugcugaagagacugcccgccgacgugcugaagaagaccaucaagaacacccuggacauccacaagagcaucaccaucaacaaccccaaggagagcaccgugaacgacaccaacgaccacgccaagaacaacgacaccaccugaggacuaguacuggcugcaucucccuuuccucuguccuccauccuucucccaggauggugaagggggaccugguacccagugauccccaccccaggauccuaaaucaugacuuaccugcuaauaaaaacucauuggaaaagugagaagaucuaaaaaaaaaaaaaaaaaaaaaaaaaaaaaaaaaaaaaaaaaaaaaaaaaaaaaaaaaaaaaaaaugcaucccccccccccccccccccccccccccccccaaaggcucuuuucagagccaccagaauu

SEQ ID NO: 21165 - RNA, 954 nt, Artificial Sequence
  mRNA product Design e-6 comprising derived and/or modified sequence from HRSV(Memphis-37)__AIY60641.1__M2-1 (opt5)
gggagagcggcucggccauuuugucccagucaguccggaggcugcggcugcagaaguaccgccugcggaguaacugcaaagaagcuuaccaugagcagacggaaccccugcaaguucgagauccgcggccacugucugaaugggaaaagaugccauuuuucccacaacuacuucgaauggccuccgcaugcccuccuggugcggcagaauuuuaugcuuaaccgcauucugaagucuauggacaaaagcaucgauacccucuccgagauuucuggagcugccgaacuggacagaacagaggaauaugcgcuuggcgucguuggggugcuggagagcuacaucggauccauuaauaacaucacgaagcaaucugcuuguguggccaugagcaaacuccugaccgagcucaauuccgaugacaucaagaagcugcgggauaacgaggaacccaauagcccuaaaauucgcgucuauaacacagugaucucuuacauugaauccaauagaaagaacaauaaacagaccauccaucugcuuaagcggcugcccgccgacguucucaaaaagacaauuaagaacacccuggauauccacaaaagcauuacaaucaauaacccuaaggagucuaccgugaacgacacgaaugaucacgcuaaaaacaaugacaccacaugaggacuaguacuggcugcaucucccuuuccucuguccuccauccuucucccaggauggugaagggggaccugguacccagugauccccaccccaggauccuaaaucaugacuuaccugcuaauaaaaacucauuggaaaagugagaagaucuaaaaaaaaaaaaaaaaaaaaaaaaaaaaaaaaaaaaaaaaaaaaaaaaaaaaaaaaaaaaaaaaugcaucccccccccccccccccccccccccccccccaaaggcucuuuucagagccaccagaauu

SEQ ID NO: 21166 - RNA, 954 nt, Artificial Sequence
  mRNA product Design e-6 comprising derived and/or modified sequence from HRSV(Memphis-37)__AIY60641.1__M2-1 (opt6)
gggagagcggcucggccauuuugucccagucaguccggaggcugcggcugcagaaguaccgccugcggaguaacugcaaagaagcuuaccauguccagacgaaacccaugcaaauucgaaauaagaggacacugccuaaacggaaaaagaugccacuucucacacaacuacuucgaauggccaccacacgcacuccucguaagacaaaacuucaugcuaaacagaauacuaaaaucaauggacaaaucaauagacacacucucagaaauaucaggagcagcagaacuagaccgaacagaagaauacgcacuaggaguaguaggaguacuagaauccuacauaggaucaauaaacaacauaacaaaacaaucagcaugcguagcaaugucaaaacuacuaacagaauuaaacucagacgacauaaaaaaacuaagagacaacgaagaaccaaacucaccaaaaauaagaguauacaacaccguaauaucauacauagaaucaaacagaaaaaacaacaaacaaacaauacaccuacuaaaaagacuaccagcagacguccuaaaaaaaacaauaaaaaacacacucgacauacacaaaucaauaaccauaaacaacccaaaagaaucaacaguaaacgacaccaacgaccacgcaaaaaacaaugacacaacauaaggacuaguacuggcugcaucucccuuuccucuguccuccauccuucucccaggauggugaagggggaccugguacccagugauccccaccccaggauccuaaaucaugacuuaccugcuaauaaaaacucauuggaaaagugagaagaucuaaaaaaaaaaaaaaaaaaaaaaaaaaaaaaaaaaaaaaaaaaaaaaaaaaaaaaaaaaaaaaaaugcaucccccccccccccccccccccccccccccccaaaggcucuuuucagagccaccagaauu

SEQ ID NO: 21167 - RNA, 954 nt, Artificial Sequence
  mRNA product Design e-6 comprising derived and/or modified sequence from HRSV(Memphis-37)__AIY60641.1__M2-1 (opt11)
gggagagcggcucggccauuuugucccagucaguccggaggcugcggcugcagaaguaccgccugcggaguaacugcaaagaagcuuaccaugucccgacgcaaccccugcaaauucgaaauccgaggccacugccucaacggcaaacgcugccacuucucccacaacuacuucgaauggcccccccacgcccuccucguacgccaaaacuucaugcucaaccgaauccucaagucaauggacaaauccaucgacacccucuccgaaaucuccggcgccgccgaacucgaccgcaccgaagaauacgcccucggcgucgucggcguccucgaauccuacaucggcuccaucaacaacaucaccaaacaauccgccugcgucgccauguccaaacuccucaccgaacucaacuccgacgacaucaaaaaacuccgcgacaacgaagaacccaacucccccaaaauccgcgucuacaacaccguuaucuccuacaucgaauccaaccgaaaaaacaacaaacaaaccauccaccuccucaaacgacuccccgccgacguccucaaaaaaaccaucaaaaauacccuagacauccacaaauccaucaccaucaacaaccccaaagaauccaccgucaacgacaccaacgaccacgccaaaaacaacgacaccaccuaaggacuaguacuggcugcaucucccuuuccucuguccuccauccuucucccaggauggugaagggggaccugguacccagugauccccaccccaggauccuaaaucaugacuuaccugcuaauaaaaacucauuggaaaagugagaagaucuaaaaaaaaaaaaaaaaaaaaaaaaaaaaaaaaaaaaaaaaaaaaaaaaaaaaaaaaaaaaaaaaugcaucccccccccccccccccccccccccccccccaaaggcucuuuucagagccaccagaauu

SEQ ID NO: 21168 - RNA, 1170 nt, Artificial Sequence
  mRNA product Design f-1 comprising derived and/or modified sequence from HRSV(Memphis-37)__AIY60641.1__M2-1 (wt)
gggagagcggcucggccauuuugucccagucaguccggaggcugcggcugcagaaguaccgccugcggaguaacugcaaagaagcuuaccaugucacgaaggaauccuugcaaauuugaaauucgaggucauugcuugaaugguaagaggugucauuuuagucauaauuauuuugaauggccaccccaugcacugcuuguaagacaaaacuuuauguuaaacagaauacuuaagucuauggauaaaagcauagauacuuuaucagaaauaaguggagcugcagaguuggacagaacugaagaguaugcccucgguguaguuggagugcuagagaguuauauaggaucaauaaauaauauaacuaaacaaucagcauguguugccaugagcaaacuccucacugaacucaacagugaugacaucaaaaaacuaagagauaaugaagagccaaauucaccuaagauaagaguguacaauacugucauaucauauauugaaagcaacaggaaaaacaauaaacaaacuauccaucuguuaaaaagauugccagcagacguauugaagaaaaccaucaaaaacacauuggauauccacaagagcauaaccaucaacaacccaaaagaaucaacuguuaaugauacaaaugaccaugccaaaaauaaugauacuaccugaggacuagugaagggaacacccaaauuuaauucagccuuaagcacaauuaauuaagagugaaacguaauuguacaagcaguuggucacccaccauagggcaugaucaacaccgcaaccuuuccuuuuucccccagugauucugaaaaaccccucuucccuucagcuugcuuagauguuccaaauuuaguaagcuuaaggcggccuacagaagaaaaagaaaaaaaaggccacaaaaguucccucucacuuucaguaaauaaaauaaaagcagcaacagaaauaaagaaauaaaugaaauucaaaaugaaauaaauauuguguugugcagcauuaaaaaaucaauaaaaauuaaaaaugagcaagaucuaaaaaaaaaaaaaaaaaaaaaaaaaaaaaaaaaaaaaaaaaaaaaaaaaaaaaaaaaaaaaaaaugcaucccccccccccccccccccccccccccccccaaaggcucuuuucagagccaccagaauu

SEQ ID NO: 21169 - RNA, 1170 nt, Artificial Sequence
  mRNA product Design f-1 comprising derived and/or modified sequence from HRSV(Memphis-37)__AIY60641.1__M2-1 (opt1)
gggagagcggcucggccauuuugucccagucaguccggaggcugcggcugcagaaguaccgccugcggaguaacugcaaagaagcuuaccaugagccgccggaaccccugcaaguucgagauccgcggccacugccugaacgggaagcggugccacuucucccacaacuacuucgaguggccgccccacgcccuccuggugcgccagaacuucaugcugaaccggauccucaagagcauggacaaguccaucgacacccugagcgagaucuccggcgccgcggagcuggaccgcaccgaggaguacgcccucggggucgugggcgugcuggagagcuacaucggguccaucaacaacaucacgaagcagagcgccugcgucgccauguccaagcugcucaccgagcugaacagcgacgacaucaagaagcugcgggacaacgaggagcccaacucccccaagauccgcguguacaacaccgugaucagcuacaucgaguccaaccggaagaacaacaagcagaccauccaccuccugaagcgccugccggccgacguccucaagaagacgaucaagaacacccuggacauccacaagagcaucaccaucaacaaccccaaggaguccaccgugaacgacacgaacgaccacgcgaagaacaacgacaccaccugaggacuagugaagggaacacccaaauuuaauucagccuuaagcacaauuaauuaagagugaaacguaauuguacaagcaguuggucacccaccauagggcaugaucaacaccgcaaccuuuccuuuuucccccagugauucugaaaaaccccucuucccuucagcuugcuuagauguuccaaauuuaguaagcuuaaggcggccuacagaagaaaaagaaaaaaaaggccacaaaaguucccucucacuuucaguaaauaaaauaaaagcagcaacagaaauaaagaaauaaaugaaauucaaaaugaaauaaauauuguguugugcagcauuaaaaaaucaauaaaaauuaaaaaugagcaagaucuaaaaaaaaaaaaaaaaaaaaaaaaaaaaaaaaaaaaaaaaaaaaaaaaaaaaaaaaaaaaaaaaugcaucccccccccccccccccccccccccccccccaaaggcucuuuucagagccaccagaauu

SEQ ID NO: 21170 - RNA, 1170 nt, Artificial Sequence
  mRNA product Design f-1 comprising derived and/or modified sequence from HRSV(Memphis-37)__AIY60641.1__M2-1 (opt2)
gggagagcggcucggccauuuugucccagucaguccggaggcugcggcugcagaaguaccgccugcggaguaacugcaaagaagcuuaccaugucccgccgcaaccccugcaaguucgagauccgcggccacugccucaacggcaagcgcugccacuucucccacaacuacuucgaguggcccccccacgcccuccucguccgccagaacuucaugcucaaccgcauccucaaguccauggacaaguccaucgacacccucuccgagaucuccggcgccgccgagcucgaccgcaccgaggaguacgcccucggcgucgucggcguccucgaguccuacaucggcuccaucaacaacaucaccaagcaguccgccugcgucgccauguccaagcuccucaccgagcucaacuccgacgacaucaagaagcuccgcgacaacgaggagcccaacucccccaagauccgcgucuacaacaccgucaucuccuacaucgaguccaaccgcaagaacaacaagcagaccauccaccuccucaagcgccuccccgccgacguccucaagaagaccaucaagaacacccucgacauccacaaguccaucaccaucaacaaccccaaggaguccaccgucaacgacaccaacgaccacgccaagaacaacgacaccaccugaggacuagugaagggaacacccaaauuuaauucagccuuaagcacaauuaauuaagagugaaacguaauuguacaagcaguuggucacccaccauagggcaugaucaacaccgcaaccuuuccuuuuucccccagugauucugaaaaaccccucuucccuucagcuugcuuagauguuccaaauuuaguaagcuuaaggcggccuacagaagaaaaagaaaaaaaaggccacaaaaguucccucucacuuucaguaaauaaaauaaaagcagcaacagaaauaaagaaauaaaugaaauucaaaaugaaauaaauauuguguugugcagcauuaaaaaaucaauaaaaauuaaaaaugagcaagaucuaaaaaaaaaaaaaaaaaaaaaaaaaaaaaaaaaaaaaaaaaaaaaaaaaaaaaaaaaaaaaaaaugcaucccccccccccccccccccccccccccccccaaaggcucuuuucagagccaccagaauu

SEQ ID NO: 21171 - RNA, 1170 nt, Artificial Sequence
  mRNA product Design f-1 comprising derived and/or modified sequence from HRSV(Memphis-37)__AIY60641.1__M2-1 (opt3)
gggagagcggcucggccauuuugucccagucaguccggaggcugcggcugcagaaguaccgccugcggaguaacugcaaagaagcuuaccaugagcagaaggaaccccugcaaguucgagauccggggccacugucugaaugggaaacgcugccauuuuucccacaacuacuucgaauggccuccacaugcacuccuugugcgacagaauuuuaugcugaaccguauuuugaagucuauggacaaaucaauagauaccuuaagugagaucagcggagcugcagaacuggacagaacagaggaauaugcccuaggugucguuggcgugcucgaguccuacauugggucuaucaauaacauuacuaagcaaucggcguguguagcuaugucaaaacugcuuacggagcugaauagcgaugacaucaagaaguugagggauaacgaggaaccgaauagucccaaaauacggguguauaacaccgucaucuccuacauugaaucuaaucgcaagaacaauaaacagacaauccaccuccugaagagacugccugccgacgugcucaaaaagacuauuaagaacaccuuagauauccauaaaagcauaacaauuaauaacccaaaggaguccaccguuaacgacacuaaugaucacgccaaaaacaaugacacaaccugaggacuagugaagggaacacccaaauuuaauucagccuuaagcacaauuaauuaagagugaaacguaauuguacaagcaguuggucacccaccauagggcaugaucaacaccgcaaccuuuccuuuuucccccagugauucugaaaaaccccucuucccuucagcuugcuuagauguuccaaauuuaguaagcuuaaggcggccuacagaagaaaaagaaaaaaaaggccacaaaaguucccucucacuuucaguaaauaaaauaaaagcagcaacagaaauaaagaaauaaaugaaauucaaaaugaaauaaauauuguguugugcagcauuaaaaaaucaauaaaaauuaaaaaugagcaagaucuaaaaaaaaaaaaaaaaaaaaaaaaaaaaaaaaaaaaaaaaaaaaaaaaaaaaaaaaaaaaaaaaugcaucccccccccccccccccccccccccccccccaaaggcucuuuucagagccaccagaauu

SEQ ID NO: 21172 - RNA, 1170 nt, Artificial Sequence
  mRNA product Design f-1 comprising derived and/or modified sequence from HRSV(Memphis-37)__AIY60641.1__M2-1 (opt4)
gggagagcggcucggccauuuugucccagucaguccggaggcugcggcugcagaaguaccgccugcggaguaacugcaaagaagcuuaccaugagcagaagaaaccccugcaaguucgagaucagaggccacugccugaacggcaagagaugccacuucagccacaacuacuucgaguggcccccccacgcccugcuggugagacagaacuucaugcugaacagaauccugaagagcauggacaagagcaucgacacccugagcgagaucagcggcgccgccgagcuggacagaaccgaggaguacgcccugggcguggugggcgugcuggagagcuacaucggcagcaucaacaacaucaccaagcagagcgccugcguggccaugagcaagcugcugaccgagcugaacagcgacgacaucaagaagcugagagacaacgaggagcccaacagccccaagaucagaguguacaacaccgugaucagcuacaucgagagcaacagaaagaacaacaagcagaccauccaccugcugaagagacugcccgccgacgugcugaagaagaccaucaagaacacccuggacauccacaagagcaucaccaucaacaaccccaaggagagcaccgugaacgacaccaacgaccacgccaagaacaacgacaccaccugaggacuagugaagggaacacccaaauuuaauucagccuuaagcacaauuaauuaagagugaaacguaauuguacaagcaguuggucacccaccauagggcaugaucaacaccgcaaccuuuccuuuuucccccagugauucugaaaaaccccucuucccuucagcuugcuuagauguuccaaauuuaguaagcuuaaggcggccuacagaagaaaaagaaaaaaaaggccacaaaaguucccucucacuuucaguaaauaaaauaaaagcagcaacagaaauaaagaaauaaaugaaauucaaaaugaaauaaauauuguguugugcagcauuaaaaaaucaauaaaaauuaaaaaugagcaagaucuaaaaaaaaaaaaaaaaaaaaaaaaaaaaaaaaaaaaaaaaaaaaaaaaaaaaaaaaaaaaaaaaugcaucccccccccccccccccccccccccccccccaaaggcucuuuucagagccaccagaauu

SEQ ID NO: 21173 - RNA, 1170 nt, Artificial Sequence
  mRNA product Design f-1 comprising derived and/or modified sequence from HRSV(Memphis-37)__AIY60641.1__M2-1 (opt5)
gggagagcggcucggccauuuugucccagucaguccggaggcugcggcugcagaaguaccgccugcggaguaacugcaaagaagcuuaccaugagcagacggaaccccugcaaguucgagauccgcggccacugucugaaugggaaaagaugccauuuuucccacaacuacuucgaauggccuccgcaugcccuccuggugcggcagaauuuuaugcuuaaccgcauucugaagucuauggacaaaagcaucgauacccucuccgagauuucuggagcugccgaacuggacagaacagaggaauaugcgcuuggcgucguuggggugcuggagagcuacaucggauccauuaauaacaucacgaagcaaucugcuuguguggccaugagcaaacuccugaccgagcucaauuccgaugacaucaagaagcugcgggauaacgaggaacccaauagcccuaaaauucgcgucuauaacacagugaucucuuacauugaauccaauagaaagaacaauaaacagaccauccaucugcuuaagcggcugcccgccgacguucucaaaaagacaauuaagaacacccuggauauccacaaaagcauuacaaucaauaacccuaaggagucuaccgugaacgacacgaaugaucacgcuaaaaacaaugacaccacaugaggacuagugaagggaacacccaaauuuaauucagccuuaagcacaauuaauuaagagugaaacguaauuguacaagcaguuggucacccaccauagggcaugaucaacaccgcaaccuuuccuuuuucccccagugauucugaaaaaccccucuucccuucagcuugcuuagauguuccaaauuuaguaagcuuaaggcggccuacagaagaaaaagaaaaaaaaggccacaaaaguucccucucacuuucaguaaauaaaauaaaagcagcaacagaaauaaagaaauaaaugaaauucaaaaugaaauaaauauuguguugugcagcauuaaaaaaucaauaaaaauuaaaaaugagcaagaucuaaaaaaaaaaaaaaaaaaaaaaaaaaaaaaaaaaaaaaaaaaaaaaaaaaaaaaaaaaaaaaaaugcaucccccccccccccccccccccccccccccccaaaggcucuuuucagagccaccagaauu

SEQ ID NO: 21174 - RNA, 1170 nt, Artificial Sequence
  mRNA product Design f-1 comprising derived and/or modified sequence from HRSV(Memphis-37)__AIY60641.1__M2-1 (opt6)
gggagagcggcucggccauuuugucccagucaguccggaggcugcggcugcagaaguaccgccugcggaguaacugcaaagaagcuuaccauguccagacgaaacccaugcaaauucgaaauaagaggacacugccuaaacggaaaaagaugccacuucucacacaacuacuucgaauggccaccacacgcacuccucguaagacaaaacuucaugcuaaacagaauacuaaaaucaauggacaaaucaauagacacacucucagaaauaucaggagcagcagaacuagaccgaacagaagaauacgcacuaggaguaguaggaguacuagaauccuacauaggaucaauaaacaacauaacaaaacaaucagcaugcguagcaaugucaaaacuacuaacagaauuaaacucagacgacauaaaaaaacuaagagacaacgaagaaccaaacucaccaaaaauaagaguauacaacaccguaauaucauacauagaaucaaacagaaaaaacaacaaacaaacaauacaccuacuaaaaagacuaccagcagacguccuaaaaaaaacaauaaaaaacacacucgacauacacaaaucaauaaccauaaacaacccaaaagaaucaacaguaaacgacaccaacgaccacgcaaaaaacaaugacacaacauaaggacuagugaagggaacacccaaauuuaauucagccuuaagcacaauuaauuaagagugaaacguaauuguacaagcaguuggucacccaccauagggcaugaucaacaccgcaaccuuuccuuuuucccccagugauucugaaaaaccccucuucccuucagcuugcuuagauguuccaaauuuaguaagcuuaaggcggccuacagaagaaaaagaaaaaaaaggccacaaaaguucccucucacuuucaguaaauaaaauaaaagcagcaacagaaauaaagaaauaaaugaaauucaaaaugaaauaaauauuguguugugcagcauuaaaaaaucaauaaaaauuaaaaaugagcaagaucuaaaaaaaaaaaaaaaaaaaaaaaaaaaaaaaaaaaaaaaaaaaaaaaaaaaaaaaaaaaaaaaaugcaucccccccccccccccccccccccccccccccaaaggcucuuuucagagccaccagaauu

SEQ ID NO: 21175 - RNA, 1170 nt, Artificial Sequence
  mRNA product Design f-1 comprising derived and/or modified sequence from HRSV(Memphis-37)__AIY60641.1__M2-1 (opt11)
gggagagcggcucggccauuuugucccagucaguccggaggcugcggcugcagaaguaccgccugcggaguaacugcaaagaagcuuaccaugucccgacgcaaccccugcaaauucgaaauccgaggccacugccucaacggcaaacgcugccacuucucccacaacuacuucgaauggcccccccacgcccuccucguacgccaaaacuucaugcucaaccgaauccucaagucaauggacaaauccaucgacacccucuccgaaaucuccggcgccgccgaacucgaccgcaccgaagaauacgcccucggcgucgucggcguccucgaauccuacaucggcuccaucaacaacaucaccaaacaauccgccugcgucgccauguccaaacuccucaccgaacucaacuccgacgacaucaaaaaacuccgcgacaacgaagaacccaacucccccaaaauccgcgucuacaacaccguuaucuccuacaucgaauccaaccgaaaaaacaacaaacaaaccauccaccuccucaaacgacuccccgccgacguccucaaaaaaaccaucaaaaauacccuagacauccacaaauccaucaccaucaacaaccccaaagaauccaccgucaacgacaccaacgaccacgccaaaaacaacgacaccaccuaaggacuagugaagggaacacccaaauuuaauucagccuuaagcacaauuaauuaagagugaaacguaauuguacaagcaguuggucacccaccauagggcaugaucaacaccgcaaccuuuccuuuuucccccagugauucugaaaaaccccucuucccuucagcuugcuuagauguuccaaauuuaguaagcuuaaggcggccuacagaagaaaaagaaaaaaaaggccacaaaaguucccucucacuuucaguaaauaaaauaaaagcagcaacagaaauaaagaaauaaaugaaauucaaaaugaaauaaauauuguguugugcagcauuaaaaaaucaauaaaaauuaaaaaugagcaagaucuaaaaaaaaaaaaaaaaaaaaaaaaaaaaaaaaaaaaaaaaaaaaaaaaaaaaaaaaaaaaaaaaugcaucccccccccccccccccccccccccccccccaaaggcucuuuucagagccaccagaauu

SEQ ID NO: 21176 - RNA, 950 nt, Artificial Sequence
  mRNA product Design f-2 comprising derived and/or modified sequence from HRSV(Memphis-37)__AIY60641.1__M2-1 (wt)
gggagagcggcucggccauuuugucccagucaguccggaggcugcggcugcagaaguaccgccugcggaguaacugcaaagaagcuuaccaugucacgaaggaauccuugcaaauuugaaauucgaggucauugcuugaaugguaagaggugucauuuuagucauaauuauuuugaauggccaccccaugcacugcuuguaagacaaaacuuuauguuaaacagaauacuuaagucuauggauaaaagcauagauacuuuaucagaaauaaguggagcugcagaguuggacagaacugaagaguaugcccucgguguaguuggagugcuagagaguuauauaggaucaauaaauaauauaacuaaacaaucagcauguguugccaugagcaaacuccucacugaacucaacagugaugacaucaaaaaacuaagagauaaugaagagccaaauucaccuaagauaagaguguacaauacugucauaucauauauugaaagcaacaggaaaaacaauaaacaaacuauccaucuguuaaaaagauugccagcagacguauugaagaaaaccaucaaaaacacauuggauauccacaagagcauaaccaucaacaacccaaaagaaucaacuguuaaugauacaaaugaccaugccaaaaauaaugauacuaccugaggacuaguggaagcauuuuccuggcugauuaaaagaaauuacucagcuauggucaucuguuccuguuagaaggcuaugcagcauauuauauacuaugcgcauguuaugaaaugcauaauaaaaaauuuuaaaaaaucuaaaagaucuaaaaaaaaaaaaaaaaaaaaaaaaaaaaaaaaaaaaaaaaaaaaaaaaaaaaaaaaaaaaaaaaugcaucccccccccccccccccccccccccccccccaaaggcucuuuucagagccaccagaauu

SEQ ID NO: 21177 - RNA, 950 nt, Artificial Sequence
  mRNA product Design f-2 comprising derived and/or modified sequence from HRSV(Memphis-37)__AIY60641.1__M2-1 (opt1)
gggagagcggcucggccauuuugucccagucaguccggaggcugcggcugcagaaguaccgccugcggaguaacugcaaagaagcuuaccaugagccgccggaaccccugcaaguucgagauccgcggccacugccugaacgggaagcggugccacuucucccacaacuacuucgaguggccgccccacgcccuccuggugcgccagaacuucaugcugaaccggauccucaagagcauggacaaguccaucgacacccugagcgagaucuccggcgccgcggagcuggaccgcaccgaggaguacgcccucggggucgugggcgugcuggagagcuacaucggguccaucaacaacaucacgaagcagagcgccugcgucgccauguccaagcugcucaccgagcugaacagcgacgacaucaagaagcugcgggacaacgaggagcccaacucccccaagauccgcguguacaacaccgugaucagcuacaucgaguccaaccggaagaacaacaagcagaccauccaccuccugaagcgccugccggccgacguccucaagaagacgaucaagaacacccuggacauccacaagagcaucaccaucaacaaccccaaggaguccaccgugaacgacacgaacgaccacgcgaagaacaacgacaccaccugaggacuaguggaagcauuuuccuggcugauuaaaagaaauuacucagcuauggucaucuguuccuguuagaaggcuaugcagcauauuauauacuaugcgcauguuaugaaaugcauaauaaaaaauuuuaaaaaaucuaaaagaucuaaaaaaaaaaaaaaaaaaaaaaaaaaaaaaaaaaaaaaaaaaaaaaaaaaaaaaaaaaaaaaaaugcaucccccccccccccccccccccccccccccccaaaggcucuuuucagagccaccagaauu

SEQ ID NO: 21178 - RNA, 950 nt, Artificial Sequence
  mRNA product Design f-2 comprising derived and/or modified sequence from HRSV(Memphis-37)__AIY60641.1__M2-1 (opt2)
gggagagcggcucggccauuuugucccagucaguccggaggcugcggcugcagaaguaccgccugcggaguaacugcaaagaagcuuaccaugucccgccgcaaccccugcaaguucgagauccgcggccacugccucaacggcaagcgcugccacuucucccacaacuacuucgaguggcccccccacgcccuccucguccgccagaacuucaugcucaaccgcauccucaaguccauggacaaguccaucgacacccucuccgagaucuccggcgccgccgagcucgaccgcaccgaggaguacgcccucggcgucgucggcguccucgaguccuacaucggcuccaucaacaacaucaccaagcaguccgccugcgucgccauguccaagcuccucaccgagcucaacuccgacgacaucaagaagcuccgcgacaacgaggagcccaacucccccaagauccgcgucuacaacaccgucaucuccuacaucgaguccaaccgcaagaacaacaagcagaccauccaccuccucaagcgccuccccgccgacguccucaagaagaccaucaagaacacccucgacauccacaaguccaucaccaucaacaaccccaaggaguccaccgucaacgacaccaacgaccacgccaagaacaacgacaccaccugaggacuaguggaagcauuuuccuggcugauuaaaagaaauuacucagcuauggucaucuguuccuguuagaaggcuaugcagcauauuauauacuaugcgcauguuaugaaaugcauaauaaaaaauuuuaaaaaaucuaaaagaucuaaaaaaaaaaaaaaaaaaaaaaaaaaaaaaaaaaaaaaaaaaaaaaaaaaaaaaaaaaaaaaaaugcaucccccccccccccccccccccccccccccccaaaggcucuuuucagagccaccagaauu

SEQ ID NO: 21179 - RNA, 950 nt, Artificial Sequence
  mRNA product Design f-2 comprising derived and/or modified sequence from HRSV(Memphis-37)__AIY60641.1__M2-1 (opt3)
gggagagcggcucggccauuuugucccagucaguccggaggcugcggcugcagaaguaccgccugcggaguaacugcaaagaagcuuaccaugagcagaaggaaccccugcaaguucgagauccggggccacugucugaaugggaaacgcugccauuuuucccacaacuacuucgaauggccuccacaugcacuccuugugcgacagaauuuuaugcugaaccguauuuugaagucuauggacaaaucaauagauaccuuaagugagaucagcggagcugcagaacuggacagaacagaggaauaugcccuaggugucguuggcgugcucgaguccuacauugggucuaucaauaacauuacuaagcaaucggcguguguagcuaugucaaaacugcuuacggagcugaauagcgaugacaucaagaaguugagggauaacgaggaaccgaauagucccaaaauacggguguauaacaccgucaucuccuacauugaaucuaaucgcaagaacaauaaacagacaauccaccuccugaagagacugccugccgacgugcucaaaaagacuauuaagaacaccuuagauauccauaaaagcauaacaauuaauaacccaaaggaguccaccguuaacgacacuaaugaucacgccaaaaacaaugacacaaccugaggacuaguggaagcauuuuccuggcugauuaaaagaaauuacucagcuauggucaucuguuccuguuagaaggcuaugcagcauauuauauacuaugcgcauguuaugaaaugcauaauaaaaaauuuuaaaaaaucuaaaagaucuaaaaaaaaaaaaaaaaaaaaaaaaaaaaaaaaaaaaaaaaaaaaaaaaaaaaaaaaaaaaaaaaugcaucccccccccccccccccccccccccccccccaaaggcucuuuucagagccaccagaauu

SEQ ID NO: 21180 - RNA, 950 nt, Artificial Sequence
  mRNA product Design f-2 comprising derived and/or modified sequence from HRSV(Memphis-37)__AIY60641.1__M2-1 (opt4)
gggagagcggcucggccauuuugucccagucaguccggaggcugcggcugcagaaguaccgccugcggaguaacugcaaagaagcuuaccaugagcagaagaaaccccugcaaguucgagaucagaggccacugccugaacggcaagagaugccacuucagccacaacuacuucgaguggcccccccacgcccugcuggugagacagaacuucaugcugaacagaauccugaagagcauggacaagagcaucgacacccugagcgagaucagcggcgccgccgagcuggacagaaccgaggaguacgcccugggcguggugggcgugcuggagagcuacaucggcagcaucaacaacaucaccaagcagagcgccugcguggccaugagcaagcugcugaccgagcugaacagcgacgacaucaagaagcugagagacaacgaggagcccaacagccccaagaucagaguguacaacaccgugaucagcuacaucgagagcaacagaaagaacaacaagcagaccauccaccugcugaagagacugcccgccgacgugcugaagaagaccaucaagaacacccuggacauccacaagagcaucaccaucaacaaccccaaggagagcaccgugaacgacaccaacgaccacgccaagaacaacgacaccaccugaggacuaguggaagcauuuuccuggcugauuaaaagaaauuacucagcuauggucaucuguuccuguuagaaggcuaugcagcauauuauauacuaugcgcauguuaugaaaugcauaauaaaaaauuuuaaaaaaucuaaaagaucuaaaaaaaaaaaaaaaaaaaaaaaaaaaaaaaaaaaaaaaaaaaaaaaaaaaaaaaaaaaaaaaaugcaucccccccccccccccccccccccccccccccaaaggcucuuuucagagccaccagaauu

SEQ ID NO: 21181 - RNA, 950 nt, Artificial Sequence
  mRNA product Design f-2 comprising derived and/or modified sequence from HRSV(Memphis-37)__AIY60641.1__M2-1 (opt5)
gggagagcggcucggccauuuugucccagucaguccggaggcugcggcugcagaaguaccgccugcggaguaacugcaaagaagcuuaccaugagcagacggaaccccugcaaguucgagauccgcggccacugucugaaugggaaaagaugccauuuuucccacaacuacuucgaauggccuccgcaugcccuccuggugcggcagaauuuuaugcuuaaccgcauucugaagucuauggacaaaagcaucgauacccucuccgagauuucuggagcugccgaacuggacagaacagaggaauaugcgcuuggcgucguuggggugcuggagagcuacaucggauccauuaauaacaucacgaagcaaucugcuuguguggccaugagcaaacuccugaccgagcucaauuccgaugacaucaagaagcugcgggauaacgaggaacccaauagcccuaaaauucgcgucuauaacacagugaucucuuacauugaauccaauagaaagaacaauaaacagaccauccaucugcuuaagcggcugcccgccgacguucucaaaaagacaauuaagaacacccuggauauccacaaaagcauuacaaucaauaacccuaaggagucuaccgugaacgacacgaaugaucacgcuaaaaacaaugacaccacaugaggacuaguggaagcauuuuccuggcugauuaaaagaaauuacucagcuauggucaucuguuccuguuagaaggcuaugcagcauauuauauacuaugcgcauguuaugaaaugcauaauaaaaaauuuuaaaaaaucuaaaagaucuaaaaaaaaaaaaaaaaaaaaaaaaaaaaaaaaaaaaaaaaaaaaaaaaaaaaaaaaaaaaaaaaugcaucccccccccccccccccccccccccccccccaaaggcucuuuucagagccaccagaauu

SEQ ID NO: 21182 - RNA, 950 nt, Artificial Sequence
  mRNA product Design f-2 comprising derived and/or modified sequence from HRSV(Memphis-37)__AIY60641.1__M2-1 (opt6)
gggagagcggcucggccauuuugucccagucaguccggaggcugcggcugcagaaguaccgccugcggaguaacugcaaagaagcuuaccauguccagacgaaacccaugcaaauucgaaauaagaggacacugccuaaacggaaaaagaugccacuucucacacaacuacuucgaauggccaccacacgcacuccucguaagacaaaacuucaugcuaaacagaauacuaaaaucaauggacaaaucaauagacacacucucagaaauaucaggagcagcagaacuagaccgaacagaagaauacgcacuaggaguaguaggaguacuagaauccuacauaggaucaauaaacaacauaacaaaacaaucagcaugcguagcaaugucaaaacuacuaacagaauuaaacucagacgacauaaaaaaacuaagagacaacgaagaaccaaacucaccaaaaauaagaguauacaacaccguaauaucauacauagaaucaaacagaaaaaacaacaaacaaacaauacaccuacuaaaaagacuaccagcagacguccuaaaaaaaacaauaaaaaacacacucgacauacacaaaucaauaaccauaaacaacccaaaagaaucaacaguaaacgacaccaacgaccacgcaaaaaacaaugacacaacauaaggacuaguggaagcauuuuccuggcugauuaaaagaaauuacucagcuauggucaucuguuccuguuagaaggcuaugcagcauauuauauacuaugcgcauguuaugaaaugcauaauaaaaaauuuuaaaaaaucuaaaagaucuaaaaaaaaaaaaaaaaaaaaaaaaaaaaaaaaaaaaaaaaaaaaaaaaaaaaaaaaaaaaaaaaugcaucccccccccccccccccccccccccccccccaaaggcucuuuucagagccaccagaauu

SEQ ID NO: 21183 - RNA, 950 nt, Artificial Sequence
  mRNA product Design f-2 comprising derived and/or modified sequence from HRSV(Memphis-37)__AIY60641.1__M2-1 (opt11)
gggagagcggcucggccauuuugucccagucaguccggaggcugcggcugcagaaguaccgccugcggaguaacugcaaagaagcuuaccaugucccgacgcaaccccugcaaauucgaaauccgaggccacugccucaacggcaaacgcugccacuucucccacaacuacuucgaauggcccccccacgcccuccucguacgccaaaacuucaugcucaaccgaauccucaagucaauggacaaauccaucgacacccucuccgaaaucuccggcgccgccgaacucgaccgcaccgaagaauacgcccucggcgucgucggcguccucgaauccuacaucggcuccaucaacaacaucaccaaacaauccgccugcgucgccauguccaaacuccucaccgaacucaacuccgacgacaucaaaaaacuccgcgacaacgaagaacccaacucccccaaaauccgcgucuacaacaccguuaucuccuacaucgaauccaaccgaaaaaacaacaaacaaaccauccaccuccucaaacgacuccccgccgacguccucaaaaaaaccaucaaaaauacccuagacauccacaaauccaucaccaucaacaaccccaaagaauccaccgucaacgacaccaacgaccacgccaaaaacaacgacaccaccuaaggacuaguggaagcauuuuccuggcugauuaaaagaaauuacucagcuauggucaucuguuccuguuagaaggcuaugcagcauauuauauacuaugcgcauguuaugaaaugcauaauaaaaaauuuuaaaaaaucuaaaagaucuaaaaaaaaaaaaaaaaaaaaaaaaaaaaaaaaaaaaaaaaaaaaaaaaaaaaaaaaaaaaaaaaugcaucccccccccccccccccccccccccccccccaaaggcucuuuucagagccaccagaauu

SEQ ID NO: 21184 - RNA, 941 nt, Artificial Sequence
  mRNA product Design f-3 comprising derived and/or modified sequence from HRSV(Memphis-37)__AIY60641.1__M2-1 (wt)
gggagagucccgcagucggcguccagcggcucugcuuguucgugugugugucguugcaggccuuauucaagcuuaccaugucacgaaggaauccuugcaaauuugaaauucgaggucauugcuugaaugguaagaggugucauuuuagucauaauuauuuugaauggccaccccaugcacugcuuguaagacaaaacuuuauguuaaacagaauacuuaagucuauggauaaaagcauagauacuuuaucagaaauaaguggagcugcagaguuggacagaacugaagaguaugcccucgguguaguuggagugcuagagaguuauauaggaucaauaaauaauauaacuaaacaaucagcauguguugccaugagcaaacuccucacugaacucaacagugaugacaucaaaaaacuaagagauaaugaagagccaaauucaccuaagauaagaguguacaauacugucauaucauauauugaaagcaacaggaaaaacaauaaacaaacuauccaucuguuaaaaagauugccagcagacguauugaagaaaaccaucaaaaacacauuggauauccacaagagcauaaccaucaacaacccaaaagaaucaacuguuaaugauacaaaugaccaugccaaaaauaaugauacuaccugaggacuaguacuggcugcaucucccuuuccucuguccuccauccuucucccaggauggugaagggggaccugguacccagugauccccaccccaggauccuaaaucaugacuuaccugcuaauaaaaacucauuggaaaagugagaagaucuaaaaaaaaaaaaaaaaaaaaaaaaaaaaaaaaaaaaaaaaaaaaaaaaaaaaaaaaaaaaaaaaugcaucccccccccccccccccccccccccccccccaaaggcucuuuucagagccaccagaauu

SEQ ID NO: 21185 - RNA, 941 nt, Artificial Sequence
  mRNA product Design f-3 comprising derived and/or modified sequence from HRSV(Memphis-37)__AIY60641.1__M2-1 (opt1)
gggagagucccgcagucggcguccagcggcucugcuuguucgugugugugucguugcaggccuuauucaagcuuaccaugagccgccggaaccccugcaaguucgagauccgcggccacugccugaacgggaagcggugccacuucucccacaacuacuucgaguggccgccccacgcccuccuggugcgccagaacuucaugcugaaccggauccucaagagcauggacaaguccaucgacacccugagcgagaucuccggcgccgcggagcuggaccgcaccgaggaguacgcccucggggucgugggcgugcuggagagcuacaucggguccaucaacaacaucacgaagcagagcgccugcgucgccauguccaagcugcucaccgagcugaacagcgacgacaucaagaagcugcgggacaacgaggagcccaacucccccaagauccgcguguacaacaccgugaucagcuacaucgaguccaaccggaagaacaacaagcagaccauccaccuccugaagcgccugccggccgacguccucaagaagacgaucaagaacacccuggacauccacaagagcaucaccaucaacaaccccaaggaguccaccgugaacgacacgaacgaccacgcgaagaacaacgacaccaccugaggacuaguacuggcugcaucucccuuuccucuguccuccauccuucucccaggauggugaagggggaccugguacccagugauccccaccccaggauccuaaaucaugacuuaccugcuaauaaaaacucauuggaaaagugagaagaucuaaaaaaaaaaaaaaaaaaaaaaaaaaaaaaaaaaaaaaaaaaaaaaaaaaaaaaaaaaaaaaaaugcaucccccccccccccccccccccccccccccccaaaggcucuuuucagagccaccagaauu

SEQ ID NO: 21186 - RNA, 941 nt, Artificial Sequence
  mRNA product Design f-3 comprising derived and/or modified sequence from HRSV(Memphis-37)__AIY60641.1__M2-1 (opt2)
gggagagucccgcagucggcguccagcggcucugcuuguucgugugugugucguugcaggccuuauucaagcuuaccaugucccgccgcaaccccugcaaguucgagauccgcggccacugccucaacggcaagcgcugccacuucucccacaacuacuucgaguggcccccccacgcccuccucguccgccagaacuucaugcucaaccgcauccucaaguccauggacaaguccaucgacacccucuccgagaucuccggcgccgccgagcucgaccgcaccgaggaguacgcccucggcgucgucggcguccucgaguccuacaucggcuccaucaacaacaucaccaagcaguccgccugcgucgccauguccaagcuccucaccgagcucaacuccgacgacaucaagaagcuccgcgacaacgaggagcccaacucccccaagauccgcgucuacaacaccgucaucuccuacaucgaguccaaccgcaagaacaacaagcagaccauccaccuccucaagcgccuccccgccgacguccucaagaagaccaucaagaacacccucgacauccacaaguccaucaccaucaacaaccccaaggaguccaccgucaacgacaccaacgaccacgccaagaacaacgacaccaccugaggacuaguacuggcugcaucucccuuuccucuguccuccauccuucucccaggauggugaagggggaccugguacccagugauccccaccccaggauccuaaaucaugacuuaccugcuaauaaaaacucauuggaaaagugagaagaucuaaaaaaaaaaaaaaaaaaaaaaaaaaaaaaaaaaaaaaaaaaaaaaaaaaaaaaaaaaaaaaaaugcaucccccccccccccccccccccccccccccccaaaggcucuuuucagagccaccagaauu

SEQ ID NO: 21187 - RNA, 941 nt, Artificial Sequence
  mRNA product Design f-3 comprising derived and/or modified sequence from HRSV(Memphis-37)__AIY60641.1__M2-1 (opt3)
gggagagucccgcagucggcguccagcggcucugcuuguucgugugugugucguugcaggccuuauucaagcuuaccaugagcagaaggaaccccugcaaguucgagauccggggccacugucugaaugggaaacgcugccauuuuucccacaacuacuucgaauggccuccacaugcacuccuugugcgacagaauuuuaugcugaaccguauuuugaagucuauggacaaaucaauagauaccuuaagugagaucagcggagcugcagaacuggacagaacagaggaauaugcccuaggugucguuggcgugcucgaguccuacauugggucuaucaauaacauuacuaagcaaucggcguguguagcuaugucaaaacugcuuacggagcugaauagcgaugacaucaagaaguugagggauaacgaggaaccgaauagucccaaaauacggguguauaacaccgucaucuccuacauugaaucuaaucgcaagaacaauaaacagacaauccaccuccugaagagacugccugccgacgugcucaaaaagacuauuaagaacaccuuagauauccauaaaagcauaacaauuaauaacccaaaggaguccaccguuaacgacacuaaugaucacgccaaaaacaaugacacaaccugaggacuaguacuggcugcaucucccuuuccucuguccuccauccuucucccaggauggugaagggggaccugguacccagugauccccaccccaggauccuaaaucaugacuuaccugcuaauaaaaacucauuggaaaagugagaagaucuaaaaaaaaaaaaaaaaaaaaaaaaaaaaaaaaaaaaaaaaaaaaaaaaaaaaaaaaaaaaaaaaugcaucccccccccccccccccccccccccccccccaaaggcucuuuucagagccaccagaauu

SEQ ID NO: 21188 - RNA, 941 nt, Artificial Sequence
  mRNA product Design f-3 comprising derived and/or modified sequence from HRSV(Memphis-37)__AIY60641.1__M2-1 (opt4)
gggagagucccgcagucggcguccagcggcucugcuuguucgugugugugucguugcaggccuuauucaagcuuaccaugagcagaagaaaccccugcaaguucgagaucagaggccacugccugaacggcaagagaugccacuucagccacaacuacuucgaguggcccccccacgcccugcuggugagacagaacuucaugcugaacagaauccugaagagcauggacaagagcaucgacacccugagcgagaucagcggcgccgccgagcuggacagaaccgaggaguacgcccugggcguggugggcgugcuggagagcuacaucggcagcaucaacaacaucaccaagcagagcgccugcguggccaugagcaagcugcugaccgagcugaacagcgacgacaucaagaagcugagagacaacgaggagcccaacagccccaagaucagaguguacaacaccgugaucagcuacaucgagagcaacagaaagaacaacaagcagaccauccaccugcugaagagacugcccgccgacgugcugaagaagaccaucaagaacacccuggacauccacaagagcaucaccaucaacaaccccaaggagagcaccgugaacgacaccaacgaccacgccaagaacaacgacaccaccugaggacuaguacuggcugcaucucccuuuccucuguccuccauccuucucccaggauggugaagggggaccugguacccagugauccccaccccaggauccuaaaucaugacuuaccugcuaauaaaaacucauuggaaaagugagaagaucuaaaaaaaaaaaaaaaaaaaaaaaaaaaaaaaaaaaaaaaaaaaaaaaaaaaaaaaaaaaaaaaaugcaucccccccccccccccccccccccccccccccaaaggcucuuuucagagccaccagaauu

SEQ ID NO: 21189 - RNA, 941 nt, Artificial Sequence
  mRNA product Design f-3 comprising derived and/or modified sequence from HRSV(Memphis-37)__AIY60641.1__M2-1 (opt5)
gggagagucccgcagucggcguccagcggcucugcuuguucgugugugugucguugcaggccuuauucaagcuuaccaugagcagacggaaccccugcaaguucgagauccgcggccacugucugaaugggaaaagaugccauuuuucccacaacuacuucgaauggccuccgcaugcccuccuggugcggcagaauuuuaugcuuaaccgcauucugaagucuauggacaaaagcaucgauacccucuccgagauuucuggagcugccgaacuggacagaacagaggaauaugcgcuuggcgucguuggggugcuggagagcuacaucggauccauuaauaacaucacgaagcaaucugcuuguguggccaugagcaaacuccugaccgagcucaauuccgaugacaucaagaagcugcgggauaacgaggaacccaauagcccuaaaauucgcgucuauaacacagugaucucuuacauugaauccaauagaaagaacaauaaacagaccauccaucugcuuaagcggcugcccgccgacguucucaaaaagacaauuaagaacacccuggauauccacaaaagcauuacaaucaauaacccuaaggagucuaccgugaacgacacgaaugaucacgcuaaaaacaaugacaccacaugaggacuaguacuggcugcaucucccuuuccucuguccuccauccuucucccaggauggugaagggggaccugguacccagugauccccaccccaggauccuaaaucaugacuuaccugcuaauaaaaacucauuggaaaagugagaagaucuaaaaaaaaaaaaaaaaaaaaaaaaaaaaaaaaaaaaaaaaaaaaaaaaaaaaaaaaaaaaaaaaugcaucccccccccccccccccccccccccccccccaaaggcucuuuucagagccaccagaauu

SEQ ID NO: 21190 - RNA, 941 nt, Artificial Sequence
  mRNA product Design f-3 comprising derived and/or modified sequence from HRSV(Memphis-37)__AIY60641.1__M2-1 (opt6)
gggagagucccgcagucggcguccagcggcucugcuuguucgugugugugucguugcaggccuuauucaagcuuaccauguccagacgaaacccaugcaaauucgaaauaagaggacacugccuaaacggaaaaagaugccacuucucacacaacuacuucgaauggccaccacacgcacuccucguaagacaaaacuucaugcuaaacagaauacuaaaaucaauggacaaaucaauagacacacucucagaaauaucaggagcagcagaacuagaccgaacagaagaauacgcacuaggaguaguaggaguacuagaauccuacauaggaucaauaaacaacauaacaaaacaaucagcaugcguagcaaugucaaaacuacuaacagaauuaaacucagacgacauaaaaaaacuaagagacaacgaagaaccaaacucaccaaaaauaagaguauacaacaccguaauaucauacauagaaucaaacagaaaaaacaacaaacaaacaauacaccuacuaaaaagacuaccagcagacguccuaaaaaaaacaauaaaaaacacacucgacauacacaaaucaauaaccauaaacaacccaaaagaaucaacaguaaacgacaccaacgaccacgcaaaaaacaaugacacaacauaaggacuaguacuggcugcaucucccuuuccucuguccuccauccuucucccaggauggugaagggggaccugguacccagugauccccaccccaggauccuaaaucaugacuuaccugcuaauaaaaacucauuggaaaagugagaagaucuaaaaaaaaaaaaaaaaaaaaaaaaaaaaaaaaaaaaaaaaaaaaaaaaaaaaaaaaaaaaaaaaugcaucccccccccccccccccccccccccccccccaaaggcucuuuucagagccaccagaauu

SEQ ID NO: 21191 - RNA, 941 nt, Artificial Sequence
  mRNA product Design f-3 comprising derived and/or modified sequence from HRSV(Memphis-37)__AIY60641.1__M2-1 (opt11)
gggagagucccgcagucggcguccagcggcucugcuuguucgugugugugucguugcaggccuuauucaagcuuaccaugucccgacgcaaccccugcaaauucgaaauccgaggccacugccucaacggcaaacgcugccacuucucccacaacuacuucgaauggcccccccacgcccuccucguacgccaaaacuucaugcucaaccgaauccucaagucaauggacaaauccaucgacacccucuccgaaaucuccggcgccgccgaacucgaccgcaccgaagaauacgcccucggcgucgucggcguccucgaauccuacaucggcuccaucaacaacaucaccaaacaauccgccugcgucgccauguccaaacuccucaccgaacucaacuccgacgacaucaaaaaacuccgcgacaacgaagaacccaacucccccaaaauccgcgucuacaacaccguuaucuccuacaucgaauccaaccgaaaaaacaacaaacaaaccauccaccuccucaaacgacuccccgccgacguccucaaaaaaaccaucaaaaauacccuagacauccacaaauccaucaccaucaacaaccccaaagaauccaccgucaacgacaccaacgaccacgccaaaaacaacgacaccaccuaaggacuaguacuggcugcaucucccuuuccucuguccuccauccuucucccaggauggugaagggggaccugguacccagugauccccaccccaggauccuaaaucaugacuuaccugcuaauaaaaacucauuggaaaagugagaagaucuaaaaaaaaaaaaaaaaaaaaaaaaaaaaaaaaaaaaaaaaaaaaaaaaaaaaaaaaaaaaaaaaugcaucccccccccccccccccccccccccccccccaaaggcucuuuucagagccaccagaauu

SEQ ID NO: 21192 - RNA, 1157 nt, Artificial Sequence
  mRNA product Design f-4 comprising derived and/or modified sequence from HRSV(Memphis-37)__AIY60641.1__M2-1 (wt)
gggagagucccgcagucggcguccagcggcucugcuuguucgugugugugucguugcaggccuuauucaagcuuaccaugucacgaaggaauccuugcaaauuugaaauucgaggucauugcuugaaugguaagaggugucauuuuagucauaauuauuuugaauggccaccccaugcacugcuuguaagacaaaacuuuauguuaaacagaauacuuaagucuauggauaaaagcauagauacuuuaucagaaauaaguggagcugcagaguuggacagaacugaagaguaugcccucgguguaguuggagugcuagagaguuauauaggaucaauaaauaauauaacuaaacaaucagcauguguugccaugagcaaacuccucacugaacucaacagugaugacaucaaaaaacuaagagauaaugaagagccaaauucaccuaagauaagaguguacaauacugucauaucauauauugaaagcaacaggaaaaacaauaaacaaacuauccaucuguuaaaaagauugccagcagacguauugaagaaaaccaucaaaaacacauuggauauccacaagagcauaaccaucaacaacccaaaagaaucaacuguuaaugauacaaaugaccaugccaaaaauaaugauacuaccugaggacuagugaagggaacacccaaauuuaauucagccuuaagcacaauuaauuaagagugaaacguaauuguacaagcaguuggucacccaccauagggcaugaucaacaccgcaaccuuuccuuuuucccccagugauucugaaaaaccccucuucccuucagcuugcuuagauguuccaaauuuaguaagcuuaaggcggccuacagaagaaaaagaaaaaaaaggccacaaaaguucccucucacuuucaguaaauaaaauaaaagcagcaacagaaauaaagaaauaaaugaaauucaaaaugaaauaaauauuguguugugcagcauuaaaaaaucaauaaaaauuaaaaaugagcaagaucuaaaaaaaaaaaaaaaaaaaaaaaaaaaaaaaaaaaaaaaaaaaaaaaaaaaaaaaaaaaaaaaaugcaucccccccccccccccccccccccccccccccaaaggcucuuuucagagccaccagaauu

SEQ ID NO: 21193 - RNA, 1157 nt, Artificial Sequence
  mRNA product Design f-4 comprising derived and/or modified sequence from HRSV(Memphis-37)__AIY60641.1__M2-1 (opt1)
gggagagucccgcagucggcguccagcggcucugcuuguucgugugugugucguugcaggccuuauucaagcuuaccaugagccgccggaaccccugcaaguucgagauccgcggccacugccugaacgggaagcggugccacuucucccacaacuacuucgaguggccgccccacgcccuccuggugcgccagaacuucaugcugaaccggauccucaagagcauggacaaguccaucgacacccugagcgagaucuccggcgccgcggagcuggaccgcaccgaggaguacgcccucggggucgugggcgugcuggagagcuacaucggguccaucaacaacaucacgaagcagagcgccugcgucgccauguccaagcugcucaccgagcugaacagcgacgacaucaagaagcugcgggacaacgaggagcccaacucccccaagauccgcguguacaacaccgugaucagcuacaucgaguccaaccggaagaacaacaagcagaccauccaccuccugaagcgccugccggccgacguccucaagaagacgaucaagaacacccuggacauccacaagagcaucaccaucaacaaccccaaggaguccaccgugaacgacacgaacgaccacgcgaagaacaacgacaccaccugaggacuagugaagggaacacccaaauuuaauucagccuuaagcacaauuaauuaagagugaaacguaauuguacaagcaguuggucacccaccauagggcaugaucaacaccgcaaccuuuccuuuuucccccagugauucugaaaaaccccucuucccuucagcuugcuuagauguuccaaauuuaguaagcuuaaggcggccuacagaagaaaaagaaaaaaaaggccacaaaaguucccucucacuuucaguaaauaaaauaaaagcagcaacagaaauaaagaaauaaaugaaauucaaaaugaaauaaauauuguguugugcagcauuaaaaaaucaauaaaaauuaaaaaugagcaagaucuaaaaaaaaaaaaaaaaaaaaaaaaaaaaaaaaaaaaaaaaaaaaaaaaaaaaaaaaaaaaaaaaugcaucccccccccccccccccccccccccccccccaaaggcucuuuucagagccaccagaauu

SEQ ID NO: 21194 - RNA, 1157 nt, Artificial Sequence
  mRNA product Design f-4 comprising derived and/or modified sequence from HRSV(Memphis-37)__AIY60641.1__M2-1 (opt2)
gggagagucccgcagucggcguccagcggcucugcuuguucgugugugugucguugcaggccuuauucaagcuuaccaugucccgccgcaaccccugcaaguucgagauccgcggccacugccucaacggcaagcgcugccacuucucccacaacuacuucgaguggcccccccacgcccuccucguccgccagaacuucaugcucaaccgcauccucaaguccauggacaaguccaucgacacccucuccgagaucuccggcgccgccgagcucgaccgcaccgaggaguacgcccucggcgucgucggcguccucgaguccuacaucggcuccaucaacaacaucaccaagcaguccgccugcgucgccauguccaagcuccucaccgagcucaacuccgacgacaucaagaagcuccgcgacaacgaggagcccaacucccccaagauccgcgucuacaacaccgucaucuccuacaucgaguccaaccgcaagaacaacaagcagaccauccaccuccucaagcgccuccccgccgacguccucaagaagaccaucaagaacacccucgacauccacaaguccaucaccaucaacaaccccaaggaguccaccgucaacgacaccaacgaccacgccaagaacaacgacaccaccugaggacuagugaagggaacacccaaauuuaauucagccuuaagcacaauuaauuaagagugaaacguaauuguacaagcaguuggucacccaccauagggcaugaucaacaccgcaaccuuuccuuuuucccccagugauucugaaaaaccccucuucccuucagcuugcuuagauguuccaaauuuaguaagcuuaaggcggccuacagaagaaaaagaaaaaaaaggccacaaaaguucccucucacuuucaguaaauaaaauaaaagcagcaacagaaauaaagaaauaaaugaaauucaaaaugaaauaaauauuguguugugcagcauuaaaaaaucaauaaaaauuaaaaaugagcaagaucuaaaaaaaaaaaaaaaaaaaaaaaaaaaaaaaaaaaaaaaaaaaaaaaaaaaaaaaaaaaaaaaaugcaucccccccccccccccccccccccccccccccaaaggcucuuuucagagccaccagaauu

SEQ ID NO: 21195 - RNA, 1157 nt, Artificial Sequence
  mRNA product Design f-4 comprising derived and/or modified sequence from HRSV(Memphis-37)__AIY60641.1__M2-1 (opt3)
gggagagucccgcagucggcguccagcggcucugcuuguucgugugugugucguugcaggccuuauucaagcuuaccaugagcagaaggaaccccugcaaguucgagauccggggccacugucugaaugggaaacgcugccauuuuucccacaacuacuucgaauggccuccacaugcacuccuugugcgacagaauuuuaugcugaaccguauuuugaagucuauggacaaaucaauagauaccuuaagugagaucagcggagcugcagaacuggacagaacagaggaauaugcccuaggugucguuggcgugcucgaguccuacauugggucuaucaauaacauuacuaagcaaucggcguguguagcuaugucaaaacugcuuacggagcugaauagcgaugacaucaagaaguugagggauaacgaggaaccgaauagucccaaaauacggguguauaacaccgucaucuccuacauugaaucuaaucgcaagaacaauaaacagacaauccaccuccugaagagacugccugccgacgugcucaaaaagacuauuaagaacaccuuagauauccauaaaagcauaacaauuaauaacccaaaggaguccaccguuaacgacacuaaugaucacgccaaaaacaaugacacaaccugaggacuagugaagggaacacccaaauuuaauucagccuuaagcacaauuaauuaagagugaaacguaauuguacaagcaguuggucacccaccauagggcaugaucaacaccgcaaccuuuccuuuuucccccagugauucugaaaaaccccucuucccuucagcuugcuuagauguuccaaauuuaguaagcuuaaggcggccuacagaagaaaaagaaaaaaaaggccacaaaaguucccucucacuuucaguaaauaaaauaaaagcagcaacagaaauaaagaaauaaaugaaauucaaaaugaaauaaauauuguguugugcagcauuaaaaaaucaauaaaaauuaaaaaugagcaagaucuaaaaaaaaaaaaaaaaaaaaaaaaaaaaaaaaaaaaaaaaaaaaaaaaaaaaaaaaaaaaaaaaugcaucccccccccccccccccccccccccccccccaaaggcucuuuucagagccaccagaauu

SEQ ID NO: 21196 - RNA, 1157 nt, Artificial Sequence
  mRNA product Design f-4 comprising derived and/or modified sequence from HRSV(Memphis-37)__AIY60641.1__M2-1 (opt4)
gggagagucccgcagucggcguccagcggcucugcuuguucgugugugugucguugcaggccuuauucaagcuuaccaugagcagaagaaaccccugcaaguucgagaucagaggccacugccugaacggcaagagaugccacuucagccacaacuacuucgaguggcccccccacgcccugcuggugagacagaacuucaugcugaacagaauccugaagagcauggacaagagcaucgacacccugagcgagaucagcggcgccgccgagcuggacagaaccgaggaguacgcccugggcguggugggcgugcuggagagcuacaucggcagcaucaacaacaucaccaagcagagcgccugcguggccaugagcaagcugcugaccgagcugaacagcgacgacaucaagaagcugagagacaacgaggagcccaacagccccaagaucagaguguacaacaccgugaucagcuacaucgagagcaacagaaagaacaacaagcagaccauccaccugcugaagagacugcccgccgacgugcugaagaagaccaucaagaacacccuggacauccacaagagcaucaccaucaacaaccccaaggagagcaccgugaacgacaccaacgaccacgccaagaacaacgacaccaccugaggacuagugaagggaacacccaaauuuaauucagccuuaagcacaauuaauuaagagugaaacguaauuguacaagcaguuggucacccaccauagggcaugaucaacaccgcaaccuuuccuuuuucccccagugauucugaaaaaccccucuucccuucagcuugcuuagauguuccaaauuuaguaagcuuaaggcggccuacagaagaaaaagaaaaaaaaggccacaaaaguucccucucacuuucaguaaauaaaauaaaagcagcaacagaaauaaagaaauaaaugaaauucaaaaugaaauaaauauuguguugugcagcauuaaaaaaucaauaaaaauuaaaaaugagcaagaucuaaaaaaaaaaaaaaaaaaaaaaaaaaaaaaaaaaaaaaaaaaaaaaaaaaaaaaaaaaaaaaaaugcaucccccccccccccccccccccccccccccccaaaggcucuuuucagagccaccagaauu

SEQ ID NO: 21197 - RNA, 1157 nt, Artificial Sequence
  mRNA product Design f-4 comprising derived and/or modified sequence from HRSV(Memphis-37)__AIY60641.1__M2-1 (opt5)
gggagagucccgcagucggcguccagcggcucugcuuguucgugugugugucguugcaggccuuauucaagcuuaccaugagcagacggaaccccugcaaguucgagauccgcggccacugucugaaugggaaaagaugccauuuuucccacaacuacuucgaauggccuccgcaugcccuccuggugcggcagaauuuuaugcuuaaccgcauucugaagucuauggacaaaagcaucgauacccucuccgagauuucuggagcugccgaacuggacagaacagaggaauaugcgcuuggcgucguuggggugcuggagagcuacaucggauccauuaauaacaucacgaagcaaucugcuuguguggccaugagcaaacuccugaccgagcucaauuccgaugacaucaagaagcugcgggauaacgaggaacccaauagcccuaaaauucgcgucuauaacacagugaucucuuacauugaauccaauagaaagaacaauaaacagaccauccaucugcuuaagcggcugcccgccgacguucucaaaaagacaauuaagaacacccuggauauccacaaaagcauuacaaucaauaacccuaaggagucuaccgugaacgacacgaaugaucacgcuaaaaacaaugacaccacaugaggacuagugaagggaacacccaaauuuaauucagccuuaagcacaauuaauuaagagugaaacguaauuguacaagcaguuggucacccaccauagggcaugaucaacaccgcaaccuuuccuuuuucccccagugauucugaaaaaccccucuucccuucagcuugcuuagauguuccaaauuuaguaagcuuaaggcggccuacagaagaaaaagaaaaaaaaggccacaaaaguucccucucacuuucaguaaauaaaauaaaagcagcaacagaaauaaagaaauaaaugaaauucaaaaugaaauaaauauuguguugugcagcauuaaaaaaucaauaaaaauuaaaaaugagcaagaucuaaaaaaaaaaaaaaaaaaaaaaaaaaaaaaaaaaaaaaaaaaaaaaaaaaaaaaaaaaaaaaaaugcaucccccccccccccccccccccccccccccccaaaggcucuuuucagagccaccagaauu

SEQ ID NO: 21198 - RNA, 1157 nt, Artificial Sequence
  mRNA product Design f-4 comprising derived and/or modified sequence from HRSV(Memphis-37)__AIY60641.1__M2-1 (opt6)
gggagagucccgcagucggcguccagcggcucugcuuguucgugugugugucguugcaggccuuauucaagcuuaccauguccagacgaaacccaugcaaauucgaaauaagaggacacugccuaaacggaaaaagaugccacuucucacacaacuacuucgaauggccaccacacgcacuccucguaagacaaaacuucaugcuaaacagaauacuaaaaucaauggacaaaucaauagacacacucucagaaauaucaggagcagcagaacuagaccgaacagaagaauacgcacuaggaguaguaggaguacuagaauccuacauaggaucaauaaacaacauaacaaaacaaucagcaugcguagcaaugucaaaacuacuaacagaauuaaacucagacgacauaaaaaaacuaagagacaacgaagaaccaaacucaccaaaaauaagaguauacaacaccguaauaucauacauagaaucaaacagaaaaaacaacaaacaaacaauacaccuacuaaaaagacuaccagcagacguccuaaaaaaaacaauaaaaaacacacucgacauacacaaaucaauaaccauaaacaacccaaaagaaucaacaguaaacgacaccaacgaccacgcaaaaaacaaugacacaacauaaggacuagugaagggaacacccaaauuuaauucagccuuaagcacaauuaauuaagagugaaacguaauuguacaagcaguuggucacccaccauagggcaugaucaacaccgcaaccuuuccuuuuucccccagugauucugaaaaaccccucuucccuucagcuugcuuagauguuccaaauuuaguaagcuuaaggcggccuacagaagaaaaagaaaaaaaaggccacaaaaguucccucucacuuucaguaaauaaaauaaaagcagcaacagaaauaaagaaauaaaugaaauucaaaaugaaauaaauauuguguugugcagcauuaaaaaaucaauaaaaauuaaaaaugagcaagaucuaaaaaaaaaaaaaaaaaaaaaaaaaaaaaaaaaaaaaaaaaaaaaaaaaaaaaaaaaaaaaaaaugcaucccccccccccccccccccccccccccccccaaaggcucuuuucagagccaccagaauu

SEQ ID NO: 21199 - RNA, 1157 nt, Artificial Sequence
  mRNA product Design f-4 comprising derived and/or modified sequence from HRSV(Memphis-37)__AIY60641.1__M2-1 (opt11)
gggagagucccgcagucggcguccagcggcucugcuuguucgugugugugucguugcaggccuuauucaagcuuaccaugucccgacgcaaccccugcaaauucgaaauccgaggccacugccucaacggcaaacgcugccacuucucccacaacuacuucgaauggcccccccacgcccuccucguacgccaaaacuucaugcucaaccgaauccucaagucaauggacaaauccaucgacacccucuccgaaaucuccggcgccgccgaacucgaccgcaccgaagaauacgcccucggcgucgucggcguccucgaauccuacaucggcuccaucaacaacaucaccaaacaauccgccugcgucgccauguccaaacuccucaccgaacucaacuccgacgacaucaaaaaacuccgcgacaacgaagaacccaacucccccaaaauccgcgucuacaacaccguuaucuccuacaucgaauccaaccgaaaaaacaacaaacaaaccauccaccuccucaaacgacuccccgccgacguccucaaaaaaaccaucaaaaauacccuagacauccacaaauccaucaccaucaacaaccccaaagaauccaccgucaacgacaccaacgaccacgccaaaaacaacgacaccaccuaaggacuagugaagggaacacccaaauuuaauucagccuuaagcacaauuaauuaagagugaaacguaauuguacaagcaguuggucacccaccauagggcaugaucaacaccgcaaccuuuccuuuuucccccagugauucugaaaaaccccucuucccuucagcuugcuuagauguuccaaauuuaguaagcuuaaggcggccuacagaagaaaaagaaaaaaaaggccacaaaaguucccucucacuuucaguaaauaaaauaaaagcagcaacagaaauaaagaaauaaaugaaauucaaaaugaaauaaauauuguguugugcagcauuaaaaaaucaauaaaaauuaaaaaugagcaagaucuaaaaaaaaaaaaaaaaaaaaaaaaaaaaaaaaaaaaaaaaaaaaaaaaaaaaaaaaaaaaaaaaugcaucccccccccccccccccccccccccccccccaaaggcucuuuucagagccaccagaauu

SEQ ID NO: 21200 - RNA, 933 nt, Artificial Sequence
  mRNA product Design f-5 comprising derived and/or modified sequence from HRSV(Memphis-37)__AIY60641.1__M2-1 (wt)
gggagacuuucccauucuguagcagaauuugguguugccuguggucuuggucccgcggagaagcuuaccaugucacgaaggaauccuugcaaauuugaaauucgaggucauugcuugaaugguaagaggugucauuuuagucauaauuauuuugaauggccaccccaugcacugcuuguaagacaaaacuuuauguuaaacagaauacuuaagucuauggauaaaagcauagauacuuuaucagaaauaaguggagcugcagaguuggacagaacugaagaguaugcccucgguguaguuggagugcuagagaguuauauaggaucaauaaauaauauaacuaaacaaucagcauguguugccaugagcaaacuccucacugaacucaacagugaugacaucaaaaaacuaagagauaaugaagagccaaauucaccuaagauaagaguguacaauacugucauaucauauauugaaagcaacaggaaaaacaauaaacaaacuauccaucuguuaaaaagauugccagcagacguauugaagaaaaccaucaaaaacacauuggauauccacaagagcauaaccaucaacaacccaaaagaaucaacuguuaaugauacaaaugaccaugccaaaaauaaugauacuaccugaggacuaguacuggcugcaucucccuuuccucuguccuccauccuucucccaggauggugaagggggaccugguacccagugauccccaccccaggauccuaaaucaugacuuaccugcuaauaaaaacucauuggaaaagugagaagaucuaaaaaaaaaaaaaaaaaaaaaaaaaaaaaaaaaaaaaaaaaaaaaaaaaaaaaaaaaaaaaaaaugcaucccccccccccccccccccccccccccccccaaaggcucuuuucagagccaccagaauu

SEQ ID NO: 21201 - RNA, 933 nt, Artificial Sequence
  mRNA product Design f-5 comprising derived and/or modified sequence from HRSV(Memphis-37)__AIY60641.1__M2-1 (opt1)
gggagacuuucccauucuguagcagaauuugguguugccuguggucuuggucccgcggagaagcuuaccaugagccgccggaaccccugcaaguucgagauccgcggccacugccugaacgggaagcggugccacuucucccacaacuacuucgaguggccgccccacgcccuccuggugcgccagaacuucaugcugaaccggauccucaagagcauggacaaguccaucgacacccugagcgagaucuccggcgccgcggagcuggaccgcaccgaggaguacgcccucggggucgugggcgugcuggagagcuacaucggguccaucaacaacaucacgaagcagagcgccugcgucgccauguccaagcugcucaccgagcugaacagcgacgacaucaagaagcugcgggacaacgaggagcccaacucccccaagauccgcguguacaacaccgugaucagcuacaucgaguccaaccggaagaacaacaagcagaccauccaccuccugaagcgccugccggccgacguccucaagaagacgaucaagaacacccuggacauccacaagagcaucaccaucaacaaccccaaggaguccaccgugaacgacacgaacgaccacgcgaagaacaacgacaccaccugaggacuaguacuggcugcaucucccuuuccucuguccuccauccuucucccaggauggugaagggggaccugguacccagugauccccaccccaggauccuaaaucaugacuuaccugcuaauaaaaacucauuggaaaagugagaagaucuaaaaaaaaaaaaaaaaaaaaaaaaaaaaaaaaaaaaaaaaaaaaaaaaaaaaaaaaaaaaaaaaugcaucccccccccccccccccccccccccccccccaaaggcucuuuucagagccaccagaauu

SEQ ID NO: 21202 - RNA, 933 nt, Artificial Sequence
  mRNA product Design f-5 comprising derived and/or modified sequence from HRSV(Memphis-37)__AIY60641.1__M2-1 (opt2)
gggagacuuucccauucuguagcagaauuugguguugccuguggucuuggucccgcggagaagcuuaccaugucccgccgcaaccccugcaaguucgagauccgcggccacugccucaacggcaagcgcugccacuucucccacaacuacuucgaguggcccccccacgcccuccucguccgccagaacuucaugcucaaccgcauccucaaguccauggacaaguccaucgacacccucuccgagaucuccggcgccgccgagcucgaccgcaccgaggaguacgcccucggcgucgucggcguccucgaguccuacaucggcuccaucaacaacaucaccaagcaguccgccugcgucgccauguccaagcuccucaccgagcucaacuccgacgacaucaagaagcuccgcgacaacgaggagcccaacucccccaagauccgcgucuacaacaccgucaucuccuacaucgaguccaaccgcaagaacaacaagcagaccauccaccuccucaagcgccuccccgccgacguccucaagaagaccaucaagaacacccucgacauccacaaguccaucaccaucaacaaccccaaggaguccaccgucaacgacaccaacgaccacgccaagaacaacgacaccaccugaggacuaguacuggcugcaucucccuuuccucuguccuccauccuucucccaggauggugaagggggaccugguacccagugauccccaccccaggauccuaaaucaugacuuaccugcuaauaaaaacucauuggaaaagugagaagaucuaaaaaaaaaaaaaaaaaaaaaaaaaaaaaaaaaaaaaaaaaaaaaaaaaaaaaaaaaaaaaaaaugcaucccccccccccccccccccccccccccccccaaaggcucuuuucagagccaccagaauu

SEQ ID NO: 21203 - RNA, 933 nt, Artificial Sequence
  mRNA product Design f-5 comprising derived and/or modified sequence from HRSV(Memphis-37)__AIY60641.1__M2-1 (opt3)
gggagacuuucccauucuguagcagaauuugguguugccuguggucuuggucccgcggagaagcuuaccaugagcagaaggaaccccugcaaguucgagauccggggccacugucugaaugggaaacgcugccauuuuucccacaacuacuucgaauggccuccacaugcacuccuugugcgacagaauuuuaugcugaaccguauuuugaagucuauggacaaaucaauagauaccuuaagugagaucagcggagcugcagaacuggacagaacagaggaauaugcccuaggugucguuggcgugcucgaguccuacauugggucuaucaauaacauuacuaagcaaucggcguguguagcuaugucaaaacugcuuacggagcugaauagcgaugacaucaagaaguugagggauaacgaggaaccgaauagucccaaaauacggguguauaacaccgucaucuccuacauugaaucuaaucgcaagaacaauaaacagacaauccaccuccugaagagacugccugccgacgugcucaaaaagacuauuaagaacaccuuagauauccauaaaagcauaacaauuaauaacccaaaggaguccaccguuaacgacacuaaugaucacgccaaaaacaaugacacaaccugaggacuaguacuggcugcaucucccuuuccucuguccuccauccuucucccaggauggugaagggggaccugguacccagugauccccaccccaggauccuaaaucaugacuuaccugcuaauaaaaacucauuggaaaagugagaagaucuaaaaaaaaaaaaaaaaaaaaaaaaaaaaaaaaaaaaaaaaaaaaaaaaaaaaaaaaaaaaaaaaugcaucccccccccccccccccccccccccccccccaaaggcucuuuucagagccaccagaauu

SEQ ID NO: 21204 - RNA, 933 nt, Artificial Sequence
  mRNA product Design f-5 comprising derived and/or modified sequence from HRSV(Memphis-37)__AIY60641.1__M2-1 (opt4)
gggagacuuucccauucuguagcagaauuugguguugccuguggucuuggucccgcggagaagcuuaccaugagcagaagaaaccccugcaaguucgagaucagaggccacugccugaacggcaagagaugccacuucagccacaacuacuucgaguggcccccccacgcccugcuggugagacagaacuucaugcugaacagaauccugaagagcauggacaagagcaucgacacccugagcgagaucagcggcgccgccgagcuggacagaaccgaggaguacgcccugggcguggugggcgugcuggagagcuacaucggcagcaucaacaacaucaccaagcagagcgccugcguggccaugagcaagcugcugaccgagcugaacagcgacgacaucaagaagcugagagacaacgaggagcccaacagccccaagaucagaguguacaacaccgugaucagcuacaucgagagcaacagaaagaacaacaagcagaccauccaccugcugaagagacugcccgccgacgugcugaagaagaccaucaagaacacccuggacauccacaagagcaucaccaucaacaaccccaaggagagcaccgugaacgacaccaacgaccacgccaagaacaacgacaccaccugaggacuaguacuggcugcaucucccuuuccucuguccuccauccuucucccaggauggugaagggggaccugguacccagugauccccaccccaggauccuaaaucaugacuuaccugcuaauaaaaacucauuggaaaagugagaagaucuaaaaaaaaaaaaaaaaaaaaaaaaaaaaaaaaaaaaaaaaaaaaaaaaaaaaaaaaaaaaaaaaugcaucccccccccccccccccccccccccccccccaaaggcucuuuucagagccaccagaauu

SEQ ID NO: 21205 - RNA, 933 nt, Artificial Sequence
  mRNA product Design f-5 comprising derived and/or modified sequence from HRSV(Memphis-37)__AIY60641.1__M2-1 (opt5)
gggagacuuucccauucuguagcagaauuugguguugccuguggucuuggucccgcggagaagcuuaccaugagcagacggaaccccugcaaguucgagauccgcggccacugucugaaugggaaaagaugccauuuuucccacaacuacuucgaauggccuccgcaugcccuccuggugcggcagaauuuuaugcuuaaccgcauucugaagucuauggacaaaagcaucgauacccucuccgagauuucuggagcugccgaacuggacagaacagaggaauaugcgcuuggcgucguuggggugcuggagagcuacaucggauccauuaauaacaucacgaagcaaucugcuuguguggccaugagcaaacuccugaccgagcucaauuccgaugacaucaagaagcugcgggauaacgaggaacccaauagcccuaaaauucgcgucuauaacacagugaucucuuacauugaauccaauagaaagaacaauaaacagaccauccaucugcuuaagcggcugcccgccgacguucucaaaaagacaauuaagaacacccuggauauccacaaaagcauuacaaucaauaacccuaaggagucuaccgugaacgacacgaaugaucacgcuaaaaacaaugacaccacaugaggacuaguacuggcugcaucucccuuuccucuguccuccauccuucucccaggauggugaagggggaccugguacccagugauccccaccccaggauccuaaaucaugacuuaccugcuaauaaaaacucauuggaaaagugagaagaucuaaaaaaaaaaaaaaaaaaaaaaaaaaaaaaaaaaaaaaaaaaaaaaaaaaaaaaaaaaaaaaaaugcaucccccccccccccccccccccccccccccccaaaggcucuuuucagagccaccagaauu

SEQ ID NO: 21206 - RNA, 933 nt, Artificial Sequence
  mRNA product Design f-5 comprising derived and/or modified sequence from HRSV(Memphis-37)__AIY60641.1__M2-1 (opt6)
gggagacuuucccauucuguagcagaauuugguguugccuguggucuuggucccgcggagaagcuuaccauguccagacgaaacccaugcaaauucgaaauaagaggacacugccuaaacggaaaaagaugccacuucucacacaacuacuucgaauggccaccacacgcacuccucguaagacaaaacuucaugcuaaacagaauacuaaaaucaauggacaaaucaauagacacacucucagaaauaucaggagcagcagaacuagaccgaacagaagaauacgcacuaggaguaguaggaguacuagaauccuacauaggaucaauaaacaacauaacaaaacaaucagcaugcguagcaaugucaaaacuacuaacagaauuaaacucagacgacauaaaaaaacuaagagacaacgaagaaccaaacucaccaaaaauaagaguauacaacaccguaauaucauacauagaaucaaacagaaaaaacaacaaacaaacaauacaccuacuaaaaagacuaccagcagacguccuaaaaaaaacaauaaaaaacacacucgacauacacaaaucaauaaccauaaacaacccaaaagaaucaacaguaaacgacaccaacgaccacgcaaaaaacaaugacacaacauaaggacuaguacuggcugcaucucccuuuccucuguccuccauccuucucccaggauggugaagggggaccugguacccagugauccccaccccaggauccuaaaucaugacuuaccugcuaauaaaaacucauuggaaaagugagaagaucuaaaaaaaaaaaaaaaaaaaaaaaaaaaaaaaaaaaaaaaaaaaaaaaaaaaaaaaaaaaaaaaaugcaucccccccccccccccccccccccccccccccaaaggcucuuuucagagccaccagaauu

SEQ ID NO: 21207 - RNA, 933 nt, Artificial Sequence
  mRNA product Design f-5 comprising derived and/or modified sequence from HRSV(Memphis-37)__AIY60641.1__M2-1 (opt11)
gggagacuuucccauucuguagcagaauuugguguugccuguggucuuggucccgcggagaagcuuaccaugucccgacgcaaccccugcaaauucgaaauccgaggccacugccucaacggcaaacgcugccacuucucccacaacuacuucgaauggcccccccacgcccuccucguacgccaaaacuucaugcucaaccgaauccucaagucaauggacaaauccaucgacacccucuccgaaaucuccggcgccgccgaacucgaccgcaccgaagaauacgcccucggcgucgucggcguccucgaauccuacaucggcuccaucaacaacaucaccaaacaauccgccugcgucgccauguccaaacuccucaccgaacucaacuccgacgacaucaaaaaacuccgcgacaacgaagaacccaacucccccaaaauccgcgucuacaacaccguuaucuccuacaucgaauccaaccgaaaaaacaacaaacaaaccauccaccuccucaaacgacuccccgccgacguccucaaaaaaaccaucaaaaauacccuagacauccacaaauccaucaccaucaacaaccccaaagaauccaccgucaacgacaccaacgaccacgccaaaaacaacgacaccaccuaaggacuaguacuggcugcaucucccuuuccucuguccuccauccuucucccaggauggugaagggggaccugguacccagugauccccaccccaggauccuaaaucaugacuuaccugcuaauaaaaacucauuggaaaagugagaagaucuaaaaaaaaaaaaaaaaaaaaaaaaaaaaaaaaaaaaaaaaaaaaaaaaaaaaaaaaaaaaaaaaugcaucccccccccccccccccccccccccccccccaaaggcucuuuucagagccaccagaauu

SEQ ID NO: 21208 - RNA, 929 nt, Artificial Sequence
  mRNA product Design g-1 comprising derived and/or modified sequence from HRSV(Memphis-37)__AIY60641.1__M2-1 (wt)
gggagacuuucccauucuguagcagaauuugguguugccuguggucuuggucccgcggagaagcuuaccaugucacgaaggaauccuugcaaauuugaaauucgaggucauugcuugaaugguaagaggugucauuuuagucauaauuauuuugaauggccaccccaugcacugcuuguaagacaaaacuuuauguuaaacagaauacuuaagucuauggauaaaagcauagauacuuuaucagaaauaaguggagcugcagaguuggacagaacugaagaguaugcccucgguguaguuggagugcuagagaguuauauaggaucaauaaauaauauaacuaaacaaucagcauguguugccaugagcaaacuccucacugaacucaacagugaugacaucaaaaaacuaagagauaaugaagagccaaauucaccuaagauaagaguguacaauacugucauaucauauauugaaagcaacaggaaaaacaauaaacaaacuauccaucuguuaaaaagauugccagcagacguauugaagaaaaccaucaaaaacacauuggauauccacaagagcauaaccaucaacaacccaaaagaaucaacuguuaaugauacaaaugaccaugccaaaaauaaugauacuaccugaggacuaguggaagcauuuuccuggcugauuaaaagaaauuacucagcuauggucaucuguuccuguuagaaggcuaugcagcauauuauauacuaugcgcauguuaugaaaugcauaauaaaaaauuuuaaaaaaucuaaaagaucuaaaaaaaaaaaaaaaaaaaaaaaaaaaaaaaaaaaaaaaaaaaaaaaaaaaaaaaaaaaaaaaaugcaucccccccccccccccccccccccccccccccaaaggcucuuuucagagccaccagaauu

SEQ ID NO: 21209 - RNA, 929 nt, Artificial Sequence
  mRNA product Design g-1 comprising derived and/or modified sequence from HRSV(Memphis-37)__AIY60641.1__M2-1 (opt1)
gggagacuuucccauucuguagcagaauuugguguugccuguggucuuggucccgcggagaagcuuaccaugagccgccggaaccccugcaaguucgagauccgcggccacugccugaacgggaagcggugccacuucucccacaacuacuucgaguggccgccccacgcccuccuggugcgccagaacuucaugcugaaccggauccucaagagcauggacaaguccaucgacacccugagcgagaucuccggcgccgcggagcuggaccgcaccgaggaguacgcccucggggucgugggcgugcuggagagcuacaucggguccaucaacaacaucacgaagcagagcgccugcgucgccauguccaagcugcucaccgagcugaacagcgacgacaucaagaagcugcgggacaacgaggagcccaacucccccaagauccgcguguacaacaccgugaucagcuacaucgaguccaaccggaagaacaacaagcagaccauccaccuccugaagcgccugccggccgacguccucaagaagacgaucaagaacacccuggacauccacaagagcaucaccaucaacaaccccaaggaguccaccgugaacgacacgaacgaccacgcgaagaacaacgacaccaccugaggacuaguggaagcauuuuccuggcugauuaaaagaaauuacucagcuauggucaucuguuccuguuagaaggcuaugcagcauauuauauacuaugcgcauguuaugaaaugcauaauaaaaaauuuuaaaaaaucuaaaagaucuaaaaaaaaaaaaaaaaaaaaaaaaaaaaaaaaaaaaaaaaaaaaaaaaaaaaaaaaaaaaaaaaugcaucccccccccccccccccccccccccccccccaaaggcucuuuucagagccaccagaauu

SEQ ID NO: 21210 - RNA, 929 nt, Artificial Sequence
  mRNA product Design g-1 comprising derived and/or modified sequence from HRSV(Memphis-37)__AIY60641.1__M2-1 (opt2)
gggagacuuucccauucuguagcagaauuugguguugccuguggucuuggucccgcggagaagcuuaccaugucccgccgcaaccccugcaaguucgagauccgcggccacugccucaacggcaagcgcugccacuucucccacaacuacuucgaguggcccccccacgcccuccucguccgccagaacuucaugcucaaccgcauccucaaguccauggacaaguccaucgacacccucuccgagaucuccggcgccgccgagcucgaccgcaccgaggaguacgcccucggcgucgucggcguccucgaguccuacaucggcuccaucaacaacaucaccaagcaguccgccugcgucgccauguccaagcuccucaccgagcucaacuccgacgacaucaagaagcuccgcgacaacgaggagcccaacucccccaagauccgcgucuacaacaccgucaucuccuacaucgaguccaaccgcaagaacaacaagcagaccauccaccuccucaagcgccuccccgccgacguccucaagaagaccaucaagaacacccucgacauccacaaguccaucaccaucaacaaccccaaggaguccaccgucaacgacaccaacgaccacgccaagaacaacgacaccaccugaggacuaguggaagcauuuuccuggcugauuaaaagaaauuacucagcuauggucaucuguuccuguuagaaggcuaugcagcauauuauauacuaugcgcauguuaugaaaugcauaauaaaaaauuuuaaaaaaucuaaaagaucuaaaaaaaaaaaaaaaaaaaaaaaaaaaaaaaaaaaaaaaaaaaaaaaaaaaaaaaaaaaaaaaaugcaucccccccccccccccccccccccccccccccaaaggcucuuuucagagccaccagaauu

SEQ ID NO: 21211 - RNA, 929 nt, Artificial Sequence
  mRNA product Design g-1 comprising derived and/or modified sequence from HRSV(Memphis-37)__AIY60641.1__M2-1 (opt3)
gggagacuuucccauucuguagcagaauuugguguugccuguggucuuggucccgcggagaagcuuaccaugagcagaaggaaccccugcaaguucgagauccggggccacugucugaaugggaaacgcugccauuuuucccacaacuacuucgaauggccuccacaugcacuccuugugcgacagaauuuuaugcugaaccguauuuugaagucuauggacaaaucaauagauaccuuaagugagaucagcggagcugcagaacuggacagaacagaggaauaugcccuaggugucguuggcgugcucgaguccuacauugggucuaucaauaacauuacuaagcaaucggcguguguagcuaugucaaaacugcuuacggagcugaauagcgaugacaucaagaaguugagggauaacgaggaaccgaauagucccaaaauacggguguauaacaccgucaucuccuacauugaaucuaaucgcaagaacaauaaacagacaauccaccuccugaagagacugccugccgacgugcucaaaaagacuauuaagaacaccuuagauauccauaaaagcauaacaauuaauaacccaaaggaguccaccguuaacgacacuaaugaucacgccaaaaacaaugacacaaccugaggacuaguggaagcauuuuccuggcugauuaaaagaaauuacucagcuauggucaucuguuccuguuagaaggcuaugcagcauauuauauacuaugcgcauguuaugaaaugcauaauaaaaaauuuuaaaaaaucuaaaagaucuaaaaaaaaaaaaaaaaaaaaaaaaaaaaaaaaaaaaaaaaaaaaaaaaaaaaaaaaaaaaaaaaugcaucccccccccccccccccccccccccccccccaaaggcucuuuucagagccaccagaauu

SEQ ID NO: 21212 - RNA, 929 nt, Artificial Sequence
  mRNA product Design g-1 comprising derived and/or modified sequence from HRSV(Memphis-37)__AIY60641.1__M2-1 (opt4)
gggagacuuucccauucuguagcagaauuugguguugccuguggucuuggucccgcggagaagcuuaccaugagcagaagaaaccccugcaaguucgagaucagaggccacugccugaacggcaagagaugccacuucagccacaacuacuucgaguggcccccccacgcccugcuggugagacagaacuucaugcugaacagaauccugaagagcauggacaagagcaucgacacccugagcgagaucagcggcgccgccgagcuggacagaaccgaggaguacgcccugggcguggugggcgugcuggagagcuacaucggcagcaucaacaacaucaccaagcagagcgccugcguggccaugagcaagcugcugaccgagcugaacagcgacgacaucaagaagcugagagacaacgaggagcccaacagccccaagaucagaguguacaacaccgugaucagcuacaucgagagcaacagaaagaacaacaagcagaccauccaccugcugaagagacugcccgccgacgugcugaagaagaccaucaagaacacccuggacauccacaagagcaucaccaucaacaaccccaaggagagcaccgugaacgacaccaacgaccacgccaagaacaacgacaccaccugaggacuaguggaagcauuuuccuggcugauuaaaagaaauuacucagcuauggucaucuguuccuguuagaaggcuaugcagcauauuauauacuaugcgcauguuaugaaaugcauaauaaaaaauuuuaaaaaaucuaaaagaucuaaaaaaaaaaaaaaaaaaaaaaaaaaaaaaaaaaaaaaaaaaaaaaaaaaaaaaaaaaaaaaaaugcaucccccccccccccccccccccccccccccccaaaggcucuuuucagagccaccagaauu

SEQ ID NO: 21213 - RNA, 929 nt, Artificial Sequence
  mRNA product Design g-1 comprising derived and/or modified sequence from HRSV(Memphis-37)__AIY60641.1__M2-1 (opt5)
gggagacuuucccauucuguagcagaauuugguguugccuguggucuuggucccgcggagaagcuuaccaugagcagacggaaccccugcaaguucgagauccgcggccacugucugaaugggaaaagaugccauuuuucccacaacuacuucgaauggccuccgcaugcccuccuggugcggcagaauuuuaugcuuaaccgcauucugaagucuauggacaaaagcaucgauacccucuccgagauuucuggagcugccgaacuggacagaacagaggaauaugcgcuuggcgucguuggggugcuggagagcuacaucggauccauuaauaacaucacgaagcaaucugcuuguguggccaugagcaaacuccugaccgagcucaauuccgaugacaucaagaagcugcgggauaacgaggaacccaauagcccuaaaauucgcgucuauaacacagugaucucuuacauugaauccaauagaaagaacaauaaacagaccauccaucugcuuaagcggcugcccgccgacguucucaaaaagacaauuaagaacacccuggauauccacaaaagcauuacaaucaauaacccuaaggagucuaccgugaacgacacgaaugaucacgcuaaaaacaaugacaccacaugaggacuaguggaagcauuuuccuggcugauuaaaagaaauuacucagcuauggucaucuguuccuguuagaaggcuaugcagcauauuauauacuaugcgcauguuaugaaaugcauaauaaaaaauuuuaaaaaaucuaaaagaucuaaaaaaaaaaaaaaaaaaaaaaaaaaaaaaaaaaaaaaaaaaaaaaaaaaaaaaaaaaaaaaaaugcaucccccccccccccccccccccccccccccccaaaggcucuuuucagagccaccagaauu

SEQ ID NO: 21214 - RNA, 929 nt, Artificial Sequence
  mRNA product Design g-1 comprising derived and/or modified sequence from HRSV(Memphis-37)__AIY60641.1__M2-1 (opt6)
gggagacuuucccauucuguagcagaauuugguguugccuguggucuuggucccgcggagaagcuuaccauguccagacgaaacccaugcaaauucgaaauaagaggacacugccuaaacggaaaaagaugccacuucucacacaacuacuucgaauggccaccacacgcacuccucguaagacaaaacuucaugcuaaacagaauacuaaaaucaauggacaaaucaauagacacacucucagaaauaucaggagcagcagaacuagaccgaacagaagaauacgcacuaggaguaguaggaguacuagaauccuacauaggaucaauaaacaacauaacaaaacaaucagcaugcguagcaaugucaaaacuacuaacagaauuaaacucagacgacauaaaaaaacuaagagacaacgaagaaccaaacucaccaaaaauaagaguauacaacaccguaauaucauacauagaaucaaacagaaaaaacaacaaacaaacaauacaccuacuaaaaagacuaccagcagacguccuaaaaaaaacaauaaaaaacacacucgacauacacaaaucaauaaccauaaacaacccaaaagaaucaacaguaaacgacaccaacgaccacgcaaaaaacaaugacacaacauaaggacuaguggaagcauuuuccuggcugauuaaaagaaauuacucagcuauggucaucuguuccuguuagaaggcuaugcagcauauuauauacuaugcgcauguuaugaaaugcauaauaaaaaauuuuaaaaaaucuaaaagaucuaaaaaaaaaaaaaaaaaaaaaaaaaaaaaaaaaaaaaaaaaaaaaaaaaaaaaaaaaaaaaaaaugcaucccccccccccccccccccccccccccccccaaaggcucuuuucagagccaccagaauu

SEQ ID NO: 21215 - RNA, 929 nt, Artificial Sequence
  mRNA product Design g-1 comprising derived and/or modified sequence from HRSV(Memphis-37)__AIY60641.1__M2-1 (opt11)
gggagacuuucccauucuguagcagaauuugguguugccuguggucuuggucccgcggagaagcuuaccaugucccgacgcaaccccugcaaauucgaaauccgaggccacugccucaacggcaaacgcugccacuucucccacaacuacuucgaauggcccccccacgcccuccucguacgccaaaacuucaugcucaaccgaauccucaagucaauggacaaauccaucgacacccucuccgaaaucuccggcgccgccgaacucgaccgcaccgaagaauacgcccucggcgucgucggcguccucgaauccuacaucggcuccaucaacaacaucaccaaacaauccgccugcgucgccauguccaaacuccucaccgaacucaacuccgacgacaucaaaaaacuccgcgacaacgaagaacccaacucccccaaaauccgcgucuacaacaccguuaucuccuacaucgaauccaaccgaaaaaacaacaaacaaaccauccaccuccucaaacgacuccccgccgacguccucaaaaaaaccaucaaaaauacccuagacauccacaaauccaucaccaucaacaaccccaaagaauccaccgucaacgacaccaacgaccacgccaaaaacaacgacaccaccuaaggacuaguggaagcauuuuccuggcugauuaaaagaaauuacucagcuauggucaucuguuccuguuagaaggcuaugcagcauauuauauacuaugcgcauguuaugaaaugcauaauaaaaaauuuuaaaaaaucuaaaagaucuaaaaaaaaaaaaaaaaaaaaaaaaaaaaaaaaaaaaaaaaaaaaaaaaaaaaaaaaaaaaaaaaugcaucccccccccccccccccccccccccccccccaaaggcucuuuucagagccaccagaauu

SEQ ID NO: 21216 - RNA, 944 nt, Artificial Sequence
  mRNA product Design g-2 comprising derived and/or modified sequence from HRSV(Memphis-37)__AIY60641.1__M2-1 (wt)
gggagaguccgcucagccagguugcagaagcggcuuagcguguguccuaaucuucucucugcguguagguaggccugugccgcaaacaagcuuaccaugucacgaaggaauccuugcaaauuugaaauucgaggucauugcuugaaugguaagaggugucauuuuagucauaauuauuuugaauggccaccccaugcacugcuuguaagacaaaacuuuauguuaaacagaauacuuaagucuauggauaaaagcauagauacuuuaucagaaauaaguggagcugcagaguuggacagaacugaagaguaugcccucgguguaguuggagugcuagagaguuauauaggaucaauaaauaauauaacuaaacaaucagcauguguugccaugagcaaacuccucacugaacucaacagugaugacaucaaaaaacuaagagauaaugaagagccaaauucaccuaagauaagaguguacaauacugucauaucauauauugaaagcaacaggaaaaacaauaaacaaacuauccaucuguuaaaaagauugccagcagacguauugaagaaaaccaucaaaaacacauuggauauccacaagagcauaaccaucaacaacccaaaagaaucaacuguuaaugauacaaaugaccaugccaaaaauaaugauacuaccugaggacuaguaauaaggaaacuguaugaaugucugugggcaggaagugaagagauccuucuguaaagguuuuuggaauuaugucugcugaauaauaaacuuuuuugaaauaauaaaucugguagaaaaaugagaucuaaaaaaaaaaaaaaaaaaaaaaaaaaaaaaaaaaaaaaaaaaaaaaaaaaaaaaaaaaaaaaaaugcaucccccccccccccccccccccccccccccccaaaggcucuuuucagagccaccagaauu

SEQ ID NO: 21217 - RNA, 944 nt, Artificial Sequence
  mRNA product Design g-2 comprising derived and/or modified sequence from HRSV(Memphis-37)__AIY60641.1__M2-1 (opt1)
gggagaguccgcucagccagguugcagaagcggcuuagcguguguccuaaucuucucucugcguguagguaggccugugccgcaaacaagcuuaccaugagccgccggaaccccugcaaguucgagauccgcggccacugccugaacgggaagcggugccacuucucccacaacuacuucgaguggccgccccacgcccuccuggugcgccagaacuucaugcugaaccggauccucaagagcauggacaaguccaucgacacccugagcgagaucuccggcgccgcggagcuggaccgcaccgaggaguacgcccucggggucgugggcgugcuggagagcuacaucggguccaucaacaacaucacgaagcagagcgccugcgucgccauguccaagcugcucaccgagcugaacagcgacgacaucaagaagcugcgggacaacgaggagcccaacucccccaagauccgcguguacaacaccgugaucagcuacaucgaguccaaccggaagaacaacaagcagaccauccaccuccugaagcgccugccggccgacguccucaagaagacgaucaagaacacccuggacauccacaagagcaucaccaucaacaaccccaaggaguccaccgugaacgacacgaacgaccacgcgaagaacaacgacaccaccugaggacuaguaauaaggaaacuguaugaaugucugugggcaggaagugaagagauccuucuguaaagguuuuuggaauuaugucugcugaauaauaaacuuuuuugaaauaauaaaucugguagaaaaaugagaucuaaaaaaaaaaaaaaaaaaaaaaaaaaaaaaaaaaaaaaaaaaaaaaaaaaaaaaaaaaaaaaaaugcaucccccccccccccccccccccccccccccccaaaggcucuuuucagagccaccagaauu

SEQ ID NO: 21218 - RNA, 944 nt, Artificial Sequence
  mRNA product Design g-2 comprising derived and/or modified sequence from HRSV(Memphis-37)__AIY60641.1__M2-1 (opt2)
gggagaguccgcucagccagguugcagaagcggcuuagcguguguccuaaucuucucucugcguguagguaggccugugccgcaaacaagcuuaccaugucccgccgcaaccccugcaaguucgagauccgcggccacugccucaacggcaagcgcugccacuucucccacaacuacuucgaguggcccccccacgcccuccucguccgccagaacuucaugcucaaccgcauccucaaguccauggacaaguccaucgacacccucuccgagaucuccggcgccgccgagcucgaccgcaccgaggaguacgcccucggcgucgucggcguccucgaguccuacaucggcuccaucaacaacaucaccaagcaguccgccugcgucgccauguccaagcuccucaccgagcucaacuccgacgacaucaagaagcuccgcgacaacgaggagcccaacucccccaagauccgcgucuacaacaccgucaucuccuacaucgaguccaaccgcaagaacaacaagcagaccauccaccuccucaagcgccuccccgccgacguccucaagaagaccaucaagaacacccucgacauccacaaguccaucaccaucaacaaccccaaggaguccaccgucaacgacaccaacgaccacgccaagaacaacgacaccaccugaggacuaguaauaaggaaacuguaugaaugucugugggcaggaagugaagagauccuucuguaaagguuuuuggaauuaugucugcugaauaauaaacuuuuuugaaauaauaaaucugguagaaaaaugagaucuaaaaaaaaaaaaaaaaaaaaaaaaaaaaaaaaaaaaaaaaaaaaaaaaaaaaaaaaaaaaaaaaugcaucccccccccccccccccccccccccccccccaaaggcucuuuucagagccaccagaauu

SEQ ID NO: 21219 - RNA, 944 nt, Artificial Sequence
  mRNA product Design g-2 comprising derived and/or modified sequence from HRSV(Memphis-37)__AIY60641.1__M2-1 (opt3)
gggagaguccgcucagccagguugcagaagcggcuuagcguguguccuaaucuucucucugcguguagguaggccugugccgcaaacaagcuuaccaugagcagaaggaaccccugcaaguucgagauccggggccacugucugaaugggaaacgcugccauuuuucccacaacuacuucgaauggccuccacaugcacuccuugugcgacagaauuuuaugcugaaccguauuuugaagucuauggacaaaucaauagauaccuuaagugagaucagcggagcugcagaacuggacagaacagaggaauaugcccuaggugucguuggcgugcucgaguccuacauugggucuaucaauaacauuacuaagcaaucggcguguguagcuaugucaaaacugcuuacggagcugaauagcgaugacaucaagaaguugagggauaacgaggaaccgaauagucccaaaauacggguguauaacaccgucaucuccuacauugaaucuaaucgcaagaacaauaaacagacaauccaccuccugaagagacugccugccgacgugcucaaaaagacuauuaagaacaccuuagauauccauaaaagcauaacaauuaauaacccaaaggaguccaccguuaacgacacuaaugaucacgccaaaaacaaugacacaaccugaggacuaguaauaaggaaacuguaugaaugucugugggcaggaagugaagagauccuucuguaaagguuuuuggaauuaugucugcugaauaauaaacuuuuuugaaauaauaaaucugguagaaaaaugagaucuaaaaaaaaaaaaaaaaaaaaaaaaaaaaaaaaaaaaaaaaaaaaaaaaaaaaaaaaaaaaaaaaugcaucccccccccccccccccccccccccccccccaaaggcucuuuucagagccaccagaauu

SEQ ID NO: 21220 - RNA, 944 nt, Artificial Sequence
  mRNA product Design g-2 comprising derived and/or modified sequence from HRSV(Memphis-37)__AIY60641.1__M2-1 (opt4)
gggagaguccgcucagccagguugcagaagcggcuuagcguguguccuaaucuucucucugcguguagguaggccugugccgcaaacaagcuuaccaugagcagaagaaaccccugcaaguucgagaucagaggccacugccugaacggcaagagaugccacuucagccacaacuacuucgaguggcccccccacgcccugcuggugagacagaacuucaugcugaacagaauccugaagagcauggacaagagcaucgacacccugagcgagaucagcggcgccgccgagcuggacagaaccgaggaguacgcccugggcguggugggcgugcuggagagcuacaucggcagcaucaacaacaucaccaagcagagcgccugcguggccaugagcaagcugcugaccgagcugaacagcgacgacaucaagaagcugagagacaacgaggagcccaacagccccaagaucagaguguacaacaccgugaucagcuacaucgagagcaacagaaagaacaacaagcagaccauccaccugcugaagagacugcccgccgacgugcugaagaagaccaucaagaacacccuggacauccacaagagcaucaccaucaacaaccccaaggagagcaccgugaacgacaccaacgaccacgccaagaacaacgacaccaccugaggacuaguaauaaggaaacuguaugaaugucugugggcaggaagugaagagauccuucuguaaagguuuuuggaauuaugucugcugaauaauaaacuuuuuugaaauaauaaaucugguagaaaaaugagaucuaaaaaaaaaaaaaaaaaaaaaaaaaaaaaaaaaaaaaaaaaaaaaaaaaaaaaaaaaaaaaaaaugcaucccccccccccccccccccccccccccccccaaaggcucuuuucagagccaccagaauu

SEQ ID NO: 21221 - RNA, 944 nt, Artificial Sequence
  mRNA product Design g-2 comprising derived and/or modified sequence from HRSV(Memphis-37)__AIY60641.1__M2-1 (opt5)
gggagaguccgcucagccagguugcagaagcggcuuagcguguguccuaaucuucucucugcguguagguaggccugugccgcaaacaagcuuaccaugagcagacggaaccccugcaaguucgagauccgcggccacugucugaaugggaaaagaugccauuuuucccacaacuacuucgaauggccuccgcaugcccuccuggugcggcagaauuuuaugcuuaaccgcauucugaagucuauggacaaaagcaucgauacccucuccgagauuucuggagcugccgaacuggacagaacagaggaauaugcgcuuggcgucguuggggugcuggagagcuacaucggauccauuaauaacaucacgaagcaaucugcuuguguggccaugagcaaacuccugaccgagcucaauuccgaugacaucaagaagcugcgggauaacgaggaacccaauagcccuaaaauucgcgucuauaacacagugaucucuuacauugaauccaauagaaagaacaauaaacagaccauccaucugcuuaagcggcugcccgccgacguucucaaaaagacaauuaagaacacccuggauauccacaaaagcauuacaaucaauaacccuaaggagucuaccgugaacgacacgaaugaucacgcuaaaaacaaugacaccacaugaggacuaguaauaaggaaacuguaugaaugucugugggcaggaagugaagagauccuucuguaaagguuuuuggaauuaugucugcugaauaauaaacuuuuuugaaauaauaaaucugguagaaaaaugagaucuaaaaaaaaaaaaaaaaaaaaaaaaaaaaaaaaaaaaaaaaaaaaaaaaaaaaaaaaaaaaaaaaugcaucccccccccccccccccccccccccccccccaaaggcucuuuucagagccaccagaauu

SEQ ID NO: 21222 - RNA, 944 nt, Artificial Sequence
  mRNA product Design g-2 comprising derived and/or modified sequence from HRSV(Memphis-37)__AIY60641.1__M2-1 (opt6)
gggagaguccgcucagccagguugcagaagcggcuuagcguguguccuaaucuucucucugcguguagguaggccugugccgcaaacaagcuuaccauguccagacgaaacccaugcaaauucgaaauaagaggacacugccuaaacggaaaaagaugccacuucucacacaacuacuucgaauggccaccacacgcacuccucguaagacaaaacuucaugcuaaacagaauacuaaaaucaauggacaaaucaauagacacacucucagaaauaucaggagcagcagaacuagaccgaacagaagaauacgcacuaggaguaguaggaguacuagaauccuacauaggaucaauaaacaacauaacaaaacaaucagcaugcguagcaaugucaaaacuacuaacagaauuaaacucagacgacauaaaaaaacuaagagacaacgaagaaccaaacucaccaaaaauaagaguauacaacaccguaauaucauacauagaaucaaacagaaaaaacaacaaacaaacaauacaccuacuaaaaagacuaccagcagacguccuaaaaaaaacaauaaaaaacacacucgacauacacaaaucaauaaccauaaacaacccaaaagaaucaacaguaaacgacaccaacgaccacgcaaaaaacaaugacacaacauaaggacuaguaauaaggaaacuguaugaaugucugugggcaggaagugaagagauccuucuguaaagguuuuuggaauuaugucugcugaauaauaaacuuuuuugaaauaauaaaucugguagaaaaaugagaucuaaaaaaaaaaaaaaaaaaaaaaaaaaaaaaaaaaaaaaaaaaaaaaaaaaaaaaaaaaaaaaaaugcaucccccccccccccccccccccccccccccccaaaggcucuuuucagagccaccagaauu

SEQ ID NO: 21223 - RNA, 944 nt, Artificial Sequence
  mRNA product Design g-2 comprising derived and/or modified sequence from HRSV(Memphis-37)__AIY60641.1__M2-1 (opt11)
gggagaguccgcucagccagguugcagaagcggcuuagcguguguccuaaucuucucucugcguguagguaggccugugccgcaaacaagcuuaccaugucccgacgcaaccccugcaaauucgaaauccgaggccacugccucaacggcaaacgcugccacuucucccacaacuacuucgaauggcccccccacgcccuccucguacgccaaaacuucaugcucaaccgaauccucaagucaauggacaaauccaucgacacccucuccgaaaucuccggcgccgccgaacucgaccgcaccgaagaauacgcccucggcgucgucggcguccucgaauccuacaucggcuccaucaacaacaucaccaaacaauccgccugcgucgccauguccaaacuccucaccgaacucaacuccgacgacaucaaaaaacuccgcgacaacgaagaacccaacucccccaaaauccgcgucuacaacaccguuaucuccuacaucgaauccaaccgaaaaaacaacaaacaaaccauccaccuccucaaacgacuccccgccgacguccucaaaaaaaccaucaaaaauacccuagacauccacaaauccaucaccaucaacaaccccaaagaauccaccgucaacgacaccaacgaccacgccaaaaacaacgacaccaccuaaggacuaguaauaaggaaacuguaugaaugucugugggcaggaagugaagagauccuucuguaaagguuuuuggaauuaugucugcugaauaauaaacuuuuuugaaauaauaaaucugguagaaaaaugagaucuaaaaaaaaaaaaaaaaaaaaaaaaaaaaaaaaaaaaaaaaaaaaaaaaaaaaaaaaaaaaaaaaugcaucccccccccccccccccccccccccccccccaaaggcucuuuucagagccaccagaauu

SEQ ID NO: 21224 - RNA, 1176 nt, Artificial Sequence
  mRNA product Design g-3 comprising derived and/or modified sequence from HRSV(Memphis-37)__AIY60641.1__M2-1 (wt)
gggagaguccgcucagccagguugcagaagcggcuuagcguguguccuaaucuucucucugcguguagguaggccugugccgcaaacaagcuuaccaugucacgaaggaauccuugcaaauuugaaauucgaggucauugcuugaaugguaagaggugucauuuuagucauaauuauuuugaauggccaccccaugcacugcuuguaagacaaaacuuuauguuaaacagaauacuuaagucuauggauaaaagcauagauacuuuaucagaaauaaguggagcugcagaguuggacagaacugaagaguaugcccucgguguaguuggagugcuagagaguuauauaggaucaauaaauaauauaacuaaacaaucagcauguguugccaugagcaaacuccucacugaacucaacagugaugacaucaaaaaacuaagagauaaugaagagccaaauucaccuaagauaagaguguacaauacugucauaucauauauugaaagcaacaggaaaaacaauaaacaaacuauccaucuguuaaaaagauugccagcagacguauugaagaaaaccaucaaaaacacauuggauauccacaagagcauaaccaucaacaacccaaaagaaucaacuguuaaugauacaaaugaccaugccaaaaauaaugauacuaccugaggacuagugaagggaacacccaaauuuaauucagccuuaagcacaauuaauuaagagugaaacguaauuguacaagcaguuggucacccaccauagggcaugaucaacaccgcaaccuuuccuuuuucccccagugauucugaaaaaccccucuucccuucagcuugcuuagauguuccaaauuuaguaagcuuaaggcggccuacagaagaaaaagaaaaaaaaggccacaaaaguucccucucacuuucaguaaauaaaauaaaagcagcaacagaaauaaagaaauaaaugaaauucaaaaugaaauaaauauuguguugugcagcauuaaaaaaucaauaaaaauuaaaaaugagcaagaucuaaaaaaaaaaaaaaaaaaaaaaaaaaaaaaaaaaaaaaaaaaaaaaaaaaaaaaaaaaaaaaaaugcaucccccccccccccccccccccccccccccccaaaggcucuuuucagagccaccagaauu

SEQ ID NO: 21225 - RNA, 1176 nt, Artificial Sequence
  mRNA product Design g-3 comprising derived and/or modified sequence from HRSV(Memphis-37)__AIY60641.1__M2-1 (opt1)
gggagaguccgcucagccagguugcagaagcggcuuagcguguguccuaaucuucucucugcguguagguaggccugugccgcaaacaagcuuaccaugagccgccggaaccccugcaaguucgagauccgcggccacugccugaacgggaagcggugccacuucucccacaacuacuucgaguggccgccccacgcccuccuggugcgccagaacuucaugcugaaccggauccucaagagcauggacaaguccaucgacacccugagcgagaucuccggcgccgcggagcuggaccgcaccgaggaguacgcccucggggucgugggcgugcuggagagcuacaucggguccaucaacaacaucacgaagcagagcgccugcgucgccauguccaagcugcucaccgagcugaacagcgacgacaucaagaagcugcgggacaacgaggagcccaacucccccaagauccgcguguacaacaccgugaucagcuacaucgaguccaaccggaagaacaacaagcagaccauccaccuccugaagcgccugccggccgacguccucaagaagacgaucaagaacacccuggacauccacaagagcaucaccaucaacaaccccaaggaguccaccgugaacgacacgaacgaccacgcgaagaacaacgacaccaccugaggacuagugaagggaacacccaaauuuaauucagccuuaagcacaauuaauuaagagugaaacguaauuguacaagcaguuggucacccaccauagggcaugaucaacaccgcaaccuuuccuuuuucccccagugauucugaaaaaccccucuucccuucagcuugcuuagauguuccaaauuuaguaagcuuaaggcggccuacagaagaaaaagaaaaaaaaggccacaaaaguucccucucacuuucaguaaauaaaauaaaagcagcaacagaaauaaagaaauaaaugaaauucaaaaugaaauaaauauuguguugugcagcauuaaaaaaucaauaaaaauuaaaaaugagcaagaucuaaaaaaaaaaaaaaaaaaaaaaaaaaaaaaaaaaaaaaaaaaaaaaaaaaaaaaaaaaaaaaaaugcaucccccccccccccccccccccccccccccccaaaggcucuuuucagagccaccagaauu

SEQ ID NO: 21226 - RNA, 1176 nt, Artificial Sequence
  mRNA product Design g-3 comprising derived and/or modified sequence from HRSV(Memphis-37)__AIY60641.1__M2-1 (opt2)
gggagaguccgcucagccagguugcagaagcggcuuagcguguguccuaaucuucucucugcguguagguaggccugugccgcaaacaagcuuaccaugucccgccgcaaccccugcaaguucgagauccgcggccacugccucaacggcaagcgcugccacuucucccacaacuacuucgaguggcccccccacgcccuccucguccgccagaacuucaugcucaaccgcauccucaaguccauggacaaguccaucgacacccucuccgagaucuccggcgccgccgagcucgaccgcaccgaggaguacgcccucggcgucgucggcguccucgaguccuacaucggcuccaucaacaacaucaccaagcaguccgccugcgucgccauguccaagcuccucaccgagcucaacuccgacgacaucaagaagcuccgcgacaacgaggagcccaacucccccaagauccgcgucuacaacaccgucaucuccuacaucgaguccaaccgcaagaacaacaagcagaccauccaccuccucaagcgccuccccgccgacguccucaagaagaccaucaagaacacccucgacauccacaaguccaucaccaucaacaaccccaaggaguccaccgucaacgacaccaacgaccacgccaagaacaacgacaccaccugaggacuagugaagggaacacccaaauuuaauucagccuuaagcacaauuaauuaagagugaaacguaauuguacaagcaguuggucacccaccauagggcaugaucaacaccgcaaccuuuccuuuuucccccagugauucugaaaaaccccucuucccuucagcuugcuuagauguuccaaauuuaguaagcuuaaggcggccuacagaagaaaaagaaaaaaaaggccacaaaaguucccucucacuuucaguaaauaaaauaaaagcagcaacagaaauaaagaaauaaaugaaauucaaaaugaaauaaauauuguguugugcagcauuaaaaaaucaauaaaaauuaaaaaugagcaagaucuaaaaaaaaaaaaaaaaaaaaaaaaaaaaaaaaaaaaaaaaaaaaaaaaaaaaaaaaaaaaaaaaugcaucccccccccccccccccccccccccccccccaaaggcucuuuucagagccaccagaauu

SEQ ID NO: 21227 - RNA, 1176 nt, Artificial Sequence
  mRNA product Design g-3 comprising derived and/or modified sequence from HRSV(Memphis-37)__AIY60641.1__M2-1 (opt3)
gggagaguccgcucagccagguugcagaagcggcuuagcguguguccuaaucuucucucugcguguagguaggccugugccgcaaacaagcuuaccaugagcagaaggaaccccugcaaguucgagauccggggccacugucugaaugggaaacgcugccauuuuucccacaacuacuucgaauggccuccacaugcacuccuugugcgacagaauuuuaugcugaaccguauuuugaagucuauggacaaaucaauagauaccuuaagugagaucagcggagcugcagaacuggacagaacagaggaauaugcccuaggugucguuggcgugcucgaguccuacauugggucuaucaauaacauuacuaagcaaucggcguguguagcuaugucaaaacugcuuacggagcugaauagcgaugacaucaagaaguugagggauaacgaggaaccgaauagucccaaaauacggguguauaacaccgucaucuccuacauugaaucuaaucgcaagaacaauaaacagacaauccaccuccugaagagacugccugccgacgugcucaaaaagacuauuaagaacaccuuagauauccauaaaagcauaacaauuaauaacccaaaggaguccaccguuaacgacacuaaugaucacgccaaaaacaaugacacaaccugaggacuagugaagggaacacccaaauuuaauucagccuuaagcacaauuaauuaagagugaaacguaauuguacaagcaguuggucacccaccauagggcaugaucaacaccgcaaccuuuccuuuuucccccagugauucugaaaaaccccucuucccuucagcuugcuuagauguuccaaauuuaguaagcuuaaggcggccuacagaagaaaaagaaaaaaaaggccacaaaaguucccucucacuuucaguaaauaaaauaaaagcagcaacagaaauaaagaaauaaaugaaauucaaaaugaaauaaauauuguguugugcagcauuaaaaaaucaauaaaaauuaaaaaugagcaagaucuaaaaaaaaaaaaaaaaaaaaaaaaaaaaaaaaaaaaaaaaaaaaaaaaaaaaaaaaaaaaaaaaugcaucccccccccccccccccccccccccccccccaaaggcucuuuucagagccaccagaauu

SEQ ID NO: 21228 - RNA, 1176 nt, Artificial Sequence
  mRNA product Design g-3 comprising derived and/or modified sequence from HRSV(Memphis-37)__AIY60641.1__M2-1 (opt4)
gggagaguccgcucagccagguugcagaagcggcuuagcguguguccuaaucuucucucugcguguagguaggccugugccgcaaacaagcuuaccaugagcagaagaaaccccugcaaguucgagaucagaggccacugccugaacggcaagagaugccacuucagccacaacuacuucgaguggcccccccacgcccugcuggugagacagaacuucaugcugaacagaauccugaagagcauggacaagagcaucgacacccugagcgagaucagcggcgccgccgagcuggacagaaccgaggaguacgcccugggcguggugggcgugcuggagagcuacaucggcagcaucaacaacaucaccaagcagagcgccugcguggccaugagcaagcugcugaccgagcugaacagcgacgacaucaagaagcugagagacaacgaggagcccaacagccccaagaucagaguguacaacaccgugaucagcuacaucgagagcaacagaaagaacaacaagcagaccauccaccugcugaagagacugcccgccgacgugcugaagaagaccaucaagaacacccuggacauccacaagagcaucaccaucaacaaccccaaggagagcaccgugaacgacaccaacgaccacgccaagaacaacgacaccaccugaggacuagugaagggaacacccaaauuuaauucagccuuaagcacaauuaauuaagagugaaacguaauuguacaagcaguuggucacccaccauagggcaugaucaacaccgcaaccuuuccuuuuucccccagugauucugaaaaaccccucuucccuucagcuugcuuagauguuccaaauuuaguaagcuuaaggcggccuacagaagaaaaagaaaaaaaaggccacaaaaguucccucucacuuucaguaaauaaaauaaaagcagcaacagaaauaaagaaauaaaugaaauucaaaaugaaauaaauauuguguugugcagcauuaaaaaaucaauaaaaauuaaaaaugagcaagaucuaaaaaaaaaaaaaaaaaaaaaaaaaaaaaaaaaaaaaaaaaaaaaaaaaaaaaaaaaaaaaaaaugcaucccccccccccccccccccccccccccccccaaaggcucuuuucagagccaccagaauu

SEQ ID NO: 21229 - RNA, 1176 nt, Artificial Sequence
  mRNA product Design g-3 comprising derived and/or modified sequence from HRSV(Memphis-37)__AIY60641.1__M2-1 (opt5)
gggagaguccgcucagccagguugcagaagcggcuuagcguguguccuaaucuucucucugcguguagguaggccugugccgcaaacaagcuuaccaugagcagacggaaccccugcaaguucgagauccgcggccacugucugaaugggaaaagaugccauuuuucccacaacuacuucgaauggccuccgcaugcccuccuggugcggcagaauuuuaugcuuaaccgcauucugaagucuauggacaaaagcaucgauacccucuccgagauuucuggagcugccgaacuggacagaacagaggaauaugcgcuuggcgucguuggggugcuggagagcuacaucggauccauuaauaacaucacgaagcaaucugcuuguguggccaugagcaaacuccugaccgagcucaauuccgaugacaucaagaagcugcgggauaacgaggaacccaauagcccuaaaauucgcgucuauaacacagugaucucuuacauugaauccaauagaaagaacaauaaacagaccauccaucugcuuaagcggcugcccgccgacguucucaaaaagacaauuaagaacacccuggauauccacaaaagcauuacaaucaauaacccuaaggagucuaccgugaacgacacgaaugaucacgcuaaaaacaaugacaccacaugaggacuagugaagggaacacccaaauuuaauucagccuuaagcacaauuaauuaagagugaaacguaauuguacaagcaguuggucacccaccauagggcaugaucaacaccgcaaccuuuccuuuuucccccagugauucugaaaaaccccucuucccuucagcuugcuuagauguuccaaauuuaguaagcuuaaggcggccuacagaagaaaaagaaaaaaaaggccacaaaaguucccucucacuuucaguaaauaaaauaaaagcagcaacagaaauaaagaaauaaaugaaauucaaaaugaaauaaauauuguguugugcagcauuaaaaaaucaauaaaaauuaaaaaugagcaagaucuaaaaaaaaaaaaaaaaaaaaaaaaaaaaaaaaaaaaaaaaaaaaaaaaaaaaaaaaaaaaaaaaugcaucccccccccccccccccccccccccccccccaaaggcucuuuucagagccaccagaauu

SEQ ID NO: 21230 - RNA, 1176 nt, Artificial Sequence
  mRNA product Design g-3 comprising derived and/or modified sequence from HRSV(Memphis-37)__AIY60641.1__M2-1 (opt6)
gggagaguccgcucagccagguugcagaagcggcuuagcguguguccuaaucuucucucugcguguagguaggccugugccgcaaacaagcuuaccauguccagacgaaacccaugcaaauucgaaauaagaggacacugccuaaacggaaaaagaugccacuucucacacaacuacuucgaauggccaccacacgcacuccucguaagacaaaacuucaugcuaaacagaauacuaaaaucaauggacaaaucaauagacacacucucagaaauaucaggagcagcagaacuagaccgaacagaagaauacgcacuaggaguaguaggaguacuagaauccuacauaggaucaauaaacaacauaacaaaacaaucagcaugcguagcaaugucaaaacuacuaacagaauuaaacucagacgacauaaaaaaacuaagagacaacgaagaaccaaacucaccaaaaauaagaguauacaacaccguaauaucauacauagaaucaaacagaaaaaacaacaaacaaacaauacaccuacuaaaaagacuaccagcagacguccuaaaaaaaacaauaaaaaacacacucgacauacacaaaucaauaaccauaaacaacccaaaagaaucaacaguaaacgacaccaacgaccacgcaaaaaacaaugacacaacauaaggacuagugaagggaacacccaaauuuaauucagccuuaagcacaauuaauuaagagugaaacguaauuguacaagcaguuggucacccaccauagggcaugaucaacaccgcaaccuuuccuuuuucccccagugauucugaaaaaccccucuucccuucagcuugcuuagauguuccaaauuuaguaagcuuaaggcggccuacagaagaaaaagaaaaaaaaggccacaaaaguucccucucacuuucaguaaauaaaauaaaagcagcaacagaaauaaagaaauaaaugaaauucaaaaugaaauaaauauuguguugugcagcauuaaaaaaucaauaaaaauuaaaaaugagcaagaucuaaaaaaaaaaaaaaaaaaaaaaaaaaaaaaaaaaaaaaaaaaaaaaaaaaaaaaaaaaaaaaaaugcaucccccccccccccccccccccccccccccccaaaggcucuuuucagagccaccagaauu

SEQ ID NO: 21231 - RNA, 1176 nt, Artificial Sequence
  mRNA product Design g-3 comprising derived and/or modified sequence from HRSV(Memphis-37)__AIY60641.1__M2-1 (opt11)
gggagaguccgcucagccagguugcagaagcggcuuagcguguguccuaaucuucucucugcguguagguaggccugugccgcaaacaagcuuaccaugucccgacgcaaccccugcaaauucgaaauccgaggccacugccucaacggcaaacgcugccacuucucccacaacuacuucgaauggcccccccacgcccuccucguacgccaaaacuucaugcucaaccgaauccucaagucaauggacaaauccaucgacacccucuccgaaaucuccggcgccgccgaacucgaccgcaccgaagaauacgcccucggcgucgucggcguccucgaauccuacaucggcuccaucaacaacaucaccaaacaauccgccugcgucgccauguccaaacuccucaccgaacucaacuccgacgacaucaaaaaacuccgcgacaacgaagaacccaacucccccaaaauccgcgucuacaacaccguuaucuccuacaucgaauccaaccgaaaaaacaacaaacaaaccauccaccuccucaaacgacuccccgccgacguccucaaaaaaaccaucaaaaauacccuagacauccacaaauccaucaccaucaacaaccccaaagaauccaccgucaacgacaccaacgaccacgccaaaaacaacgacaccaccuaaggacuagugaagggaacacccaaauuuaauucagccuuaagcacaauuaauuaagagugaaacguaauuguacaagcaguuggucacccaccauagggcaugaucaacaccgcaaccuuuccuuuuucccccagugauucugaaaaaccccucuucccuucagcuugcuuagauguuccaaauuuaguaagcuuaaggcggccuacagaagaaaaagaaaaaaaaggccacaaaaguucccucucacuuucaguaaauaaaauaaaagcagcaacagaaauaaagaaauaaaugaaauucaaaaugaaauaaauauuguguugugcagcauuaaaaaaucaauaaaaauuaaaaaugagcaagaucuaaaaaaaaaaaaaaaaaaaaaaaaaaaaaaaaaaaaaaaaaaaaaaaaaaaaaaaaaaaaaaaaugcaucccccccccccccccccccccccccccccccaaaggcucuuuucagagccaccagaauu

SEQ ID NO: 21232 - RNA, 971 nt, Artificial Sequence
  mRNA product Design g-4 comprising derived and/or modified sequence from HRSV(Memphis-37)__AIY60641.1__M2-1 (wt)
gggagacuccugucgggcggaaguaggaggaguagaguuuaaaaacaguacucuuuuuccgguucgggacguaguugaagcaacgacaagccggauaaccgcucuugagacaggaagcuuaccaugucacgaaggaauccuugcaaauuugaaauucgaggucauugcuugaaugguaagaggugucauuuuagucauaauuauuuugaauggccaccccaugcacugcuuguaagacaaaacuuuauguuaaacagaauacuuaagucuauggauaaaagcauagauacuuuaucagaaauaaguggagcugcagaguuggacagaacugaagaguaugcccucgguguaguuggagugcuagagaguuauauaggaucaauaaauaauauaacuaaacaaucagcauguguugccaugagcaaacuccucacugaacucaacagugaugacaucaaaaaacuaagagauaaugaagagccaaauucaccuaagauaagaguguacaauacugucauaucauauauugaaagcaacaggaaaaacaauaaacaaacuauccaucuguuaaaaagauugccagcagacguauugaagaaaaccaucaaaaacacauuggauauccacaagagcauaaccaucaacaacccaaaagaaucaacuguuaaugauacaaaugaccaugccaaaaauaaugauacuaccugaggacuaguaauaaggaaacuguaugaaugucugugggcaggaagugaagagauccuucuguaaagguuuuuggaauuaugucugcugaauaauaaacuuuuuugaaauaauaaaucugguagaaaaaugagaucuaaaaaaaaaaaaaaaaaaaaaaaaaaaaaaaaaaaaaaaaaaaaaaaaaaaaaaaaaaaaaaaaugcaucccccccccccccccccccccccccccccccaaaggcucuuuucagagccaccagaauu

SEQ ID NO: 21233 - RNA, 971 nt, Artificial Sequence
  mRNA product Design g-4 comprising derived and/or modified sequence from HRSV(Memphis-37)__AIY60641.1__M2-1 (opt1)
gggagacuccugucgggcggaaguaggaggaguagaguuuaaaaacaguacucuuuuuccgguucgggacguaguugaagcaacgacaagccggauaaccgcucuugagacaggaagcuuaccaugagccgccggaaccccugcaaguucgagauccgcggccacugccugaacgggaagcggugccacuucucccacaacuacuucgaguggccgccccacgcccuccuggugcgccagaacuucaugcugaaccggauccucaagagcauggacaaguccaucgacacccugagcgagaucuccggcgccgcggagcuggaccgcaccgaggaguacgcccucggggucgugggcgugcuggagagcuacaucggguccaucaacaacaucacgaagcagagcgccugcgucgccauguccaagcugcucaccgagcugaacagcgacgacaucaagaagcugcgggacaacgaggagcccaacucccccaagauccgcguguacaacaccgugaucagcuacaucgaguccaaccggaagaacaacaagcagaccauccaccuccugaagcgccugccggccgacguccucaagaagacgaucaagaacacccuggacauccacaagagcaucaccaucaacaaccccaaggaguccaccgugaacgacacgaacgaccacgcgaagaacaacgacaccaccugaggacuaguaauaaggaaacuguaugaaugucugugggcaggaagugaagagauccuucuguaaagguuuuuggaauuaugucugcugaauaauaaacuuuuuugaaauaauaaaucugguagaaaaaugagaucuaaaaaaaaaaaaaaaaaaaaaaaaaaaaaaaaaaaaaaaaaaaaaaaaaaaaaaaaaaaaaaaaugcaucccccccccccccccccccccccccccccccaaaggcucuuuucagagccaccagaauu

SEQ ID NO: 21234 - RNA, 971 nt, Artificial Sequence
  mRNA product Design g-4 comprising derived and/or modified sequence from HRSV(Memphis-37)__AIY60641.1__M2-1 (opt2)
gggagacuccugucgggcggaaguaggaggaguagaguuuaaaaacaguacucuuuuuccgguucgggacguaguugaagcaacgacaagccggauaaccgcucuugagacaggaagcuuaccaugucccgccgcaaccccugcaaguucgagauccgcggccacugccucaacggcaagcgcugccacuucucccacaacuacuucgaguggcccccccacgcccuccucguccgccagaacuucaugcucaaccgcauccucaaguccauggacaaguccaucgacacccucuccgagaucuccggcgccgccgagcucgaccgcaccgaggaguacgcccucggcgucgucggcguccucgaguccuacaucggcuccaucaacaacaucaccaagcaguccgccugcgucgccauguccaagcuccucaccgagcucaacuccgacgacaucaagaagcuccgcgacaacgaggagcccaacucccccaagauccgcgucuacaacaccgucaucuccuacaucgaguccaaccgcaagaacaacaagcagaccauccaccuccucaagcgccuccccgccgacguccucaagaagaccaucaagaacacccucgacauccacaaguccaucaccaucaacaaccccaaggaguccaccgucaacgacaccaacgaccacgccaagaacaacgacaccaccugaggacuaguaauaaggaaacuguaugaaugucugugggcaggaagugaagagauccuucuguaaagguuuuuggaauuaugucugcugaauaauaaacuuuuuugaaauaauaaaucugguagaaaaaugagaucuaaaaaaaaaaaaaaaaaaaaaaaaaaaaaaaaaaaaaaaaaaaaaaaaaaaaaaaaaaaaaaaaugcaucccccccccccccccccccccccccccccccaaaggcucuuuucagagccaccagaauu

SEQ ID NO: 21235 - RNA, 971 nt, Artificial Sequence
  mRNA product Design g-4 comprising derived and/or modified sequence from HRSV(Memphis-37)__AIY60641.1__M2-1 (opt3)
gggagacuccugucgggcggaaguaggaggaguagaguuuaaaaacaguacucuuuuuccgguucgggacguaguugaagcaacgacaagccggauaaccgcucuugagacaggaagcuuaccaugagcagaaggaaccccugcaaguucgagauccggggccacugucugaaugggaaacgcugccauuuuucccacaacuacuucgaauggccuccacaugcacuccuugugcgacagaauuuuaugcugaaccguauuuugaagucuauggacaaaucaauagauaccuuaagugagaucagcggagcugcagaacuggacagaacagaggaauaugcccuaggugucguuggcgugcucgaguccuacauugggucuaucaauaacauuacuaagcaaucggcguguguagcuaugucaaaacugcuuacggagcugaauagcgaugacaucaagaaguugagggauaacgaggaaccgaauagucccaaaauacggguguauaacaccgucaucuccuacauugaaucuaaucgcaagaacaauaaacagacaauccaccuccugaagagacugccugccgacgugcucaaaaagacuauuaagaacaccuuagauauccauaaaagcauaacaauuaauaacccaaaggaguccaccguuaacgacacuaaugaucacgccaaaaacaaugacacaaccugaggacuaguaauaaggaaacuguaugaaugucugugggcaggaagugaagagauccuucuguaaagguuuuuggaauuaugucugcugaauaauaaacuuuuuugaaauaauaaaucugguagaaaaaugagaucuaaaaaaaaaaaaaaaaaaaaaaaaaaaaaaaaaaaaaaaaaaaaaaaaaaaaaaaaaaaaaaaaugcaucccccccccccccccccccccccccccccccaaaggcucuuuucagagccaccagaauu

SEQ ID NO: 21236 - RNA, 971 nt, Artificial Sequence
  mRNA product Design g-4 comprising derived and/or modified sequence from HRSV(Memphis-37)__AIY60641.1__M2-1 (opt4)
gggagacuccugucgggcggaaguaggaggaguagaguuuaaaaacaguacucuuuuuccgguucgggacguaguugaagcaacgacaagccggauaaccgcucuugagacaggaagcuuaccaugagcagaagaaaccccugcaaguucgagaucagaggccacugccugaacggcaagagaugccacuucagccacaacuacuucgaguggcccccccacgcccugcuggugagacagaacuucaugcugaacagaauccugaagagcauggacaagagcaucgacacccugagcgagaucagcggcgccgccgagcuggacagaaccgaggaguacgcccugggcguggugggcgugcuggagagcuacaucggcagcaucaacaacaucaccaagcagagcgccugcguggccaugagcaagcugcugaccgagcugaacagcgacgacaucaagaagcugagagacaacgaggagcccaacagccccaagaucagaguguacaacaccgugaucagcuacaucgagagcaacagaaagaacaacaagcagaccauccaccugcugaagagacugcccgccgacgugcugaagaagaccaucaagaacacccuggacauccacaagagcaucaccaucaacaaccccaaggagagcaccgugaacgacaccaacgaccacgccaagaacaacgacaccaccugaggacuaguaauaaggaaacuguaugaaugucugugggcaggaagugaagagauccuucuguaaagguuuuuggaauuaugucugcugaauaauaaacuuuuuugaaauaauaaaucugguagaaaaaugagaucuaaaaaaaaaaaaaaaaaaaaaaaaaaaaaaaaaaaaaaaaaaaaaaaaaaaaaaaaaaaaaaaaugcaucccccccccccccccccccccccccccccccaaaggcucuuuucagagccaccagaauu

SEQ ID NO: 21237 - RNA, 971 nt, Artificial Sequence
  mRNA product Design g-4 comprising derived and/or modified sequence from HRSV(Memphis-37)__AIY60641.1__M2-1 (opt5)
gggagacuccugucgggcggaaguaggaggaguagaguuuaaaaacaguacucuuuuuccgguucgggacguaguugaagcaacgacaagccggauaaccgcucuugagacaggaagcuuaccaugagcagacggaaccccugcaaguucgagauccgcggccacugucugaaugggaaaagaugccauuuuucccacaacuacuucgaauggccuccgcaugcccuccuggugcggcagaauuuuaugcuuaaccgcauucugaagucuauggacaaaagcaucgauacccucuccgagauuucuggagcugccgaacuggacagaacagaggaauaugcgcuuggcgucguuggggugcuggagagcuacaucggauccauuaauaacaucacgaagcaaucugcuuguguggccaugagcaaacuccugaccgagcucaauuccgaugacaucaagaagcugcgggauaacgaggaacccaauagcccuaaaauucgcgucuauaacacagugaucucuuacauugaauccaauagaaagaacaauaaacagaccauccaucugcuuaagcggcugcccgccgacguucucaaaaagacaauuaagaacacccuggauauccacaaaagcauuacaaucaauaacccuaaggagucuaccgugaacgacacgaaugaucacgcuaaaaacaaugacaccacaugaggacuaguaauaaggaaacuguaugaaugucugugggcaggaagugaagagauccuucuguaaagguuuuuggaauuaugucugcugaauaauaaacuuuuuugaaauaauaaaucugguagaaaaaugagaucuaaaaaaaaaaaaaaaaaaaaaaaaaaaaaaaaaaaaaaaaaaaaaaaaaaaaaaaaaaaaaaaaugcaucccccccccccccccccccccccccccccccaaaggcucuuuucagagccaccagaauu

SEQ ID NO: 21238 - RNA, 971 nt, Artificial Sequence
  mRNA product Design g-4 comprising derived and/or modified sequence from HRSV(Memphis-37)__AIY60641.1__M2-1 (opt6)
gggagacuccugucgggcggaaguaggaggaguagaguuuaaaaacaguacucuuuuuccgguucgggacguaguugaagcaacgacaagccggauaaccgcucuugagacaggaagcuuaccauguccagacgaaacccaugcaaauucgaaauaagaggacacugccuaaacggaaaaagaugccacuucucacacaacuacuucgaauggccaccacacgcacuccucguaagacaaaacuucaugcuaaacagaauacuaaaaucaauggacaaaucaauagacacacucucagaaauaucaggagcagcagaacuagaccgaacagaagaauacgcacuaggaguaguaggaguacuagaauccuacauaggaucaauaaacaacauaacaaaacaaucagcaugcguagcaaugucaaaacuacuaacagaauuaaacucagacgacauaaaaaaacuaagagacaacgaagaaccaaacucaccaaaaauaagaguauacaacaccguaauaucauacauagaaucaaacagaaaaaacaacaaacaaacaauacaccuacuaaaaagacuaccagcagacguccuaaaaaaaacaauaaaaaacacacucgacauacacaaaucaauaaccauaaacaacccaaaagaaucaacaguaaacgacaccaacgaccacgcaaaaaacaaugacacaacauaaggacuaguaauaaggaaacuguaugaaugucugugggcaggaagugaagagauccuucuguaaagguuuuuggaauuaugucugcugaauaauaaacuuuuuugaaauaauaaaucugguagaaaaaugagaucuaaaaaaaaaaaaaaaaaaaaaaaaaaaaaaaaaaaaaaaaaaaaaaaaaaaaaaaaaaaaaaaaugcaucccccccccccccccccccccccccccccccaaaggcucuuuucagagccaccagaauu

SEQ ID NO: 21239 - RNA, 971 nt, Artificial Sequence
  mRNA product Design g-4 comprising derived and/or modified sequence from HRSV(Memphis-37)__AIY60641.1__M2-1 (opt11)
gggagacuccugucgggcggaaguaggaggaguagaguuuaaaaacaguacucuuuuuccgguucgggacguaguugaagcaacgacaagccggauaaccgcucuugagacaggaagcuuaccaugucccgacgcaaccccugcaaauucgaaauccgaggccacugccucaacggcaaacgcugccacuucucccacaacuacuucgaauggcccccccacgcccuccucguacgccaaaacuucaugcucaaccgaauccucaagucaauggacaaauccaucgacacccucuccgaaaucuccggcgccgccgaacucgaccgcaccgaagaauacgcccucggcgucgucggcguccucgaauccuacaucggcuccaucaacaacaucaccaaacaauccgccugcgucgccauguccaaacuccucaccgaacucaacuccgacgacaucaaaaaacuccgcgacaacgaagaacccaacucccccaaaauccgcgucuacaacaccguuaucuccuacaucgaauccaaccgaaaaaacaacaaacaaaccauccaccuccucaaacgacuccccgccgacguccucaaaaaaaccaucaaaaauacccuagacauccacaaauccaucaccaucaacaaccccaaagaauccaccgucaacgacaccaacgaccacgccaaaaacaacgacaccaccuaaggacuaguaauaaggaaacuguaugaaugucugugggcaggaagugaagagauccuucuguaaagguuuuuggaauuaugucugcugaauaauaaacuuuuuugaaauaauaaaucugguagaaaaaugagaucuaaaaaaaaaaaaaaaaaaaaaaaaaaaaaaaaaaaaaaaaaaaaaaaaaaaaaaaaaaaaaaaaugcaucccccccccccccccccccccccccccccccaaaggcucuuuucagagccaccagaauu

SEQ ID NO: 21240 - RNA, 947 nt, Artificial Sequence
  mRNA product Design g-5 comprising derived and/or modified sequence from HRSV(Memphis-37)__AIY60641.1__M2-1 (wt)
gggagacccgugacccggaaguuguacggcuacgcgacuuucccucccacaaacccucgcgcccuuccuuuccuacuugggcccggcagaaagcuuaccaugucacgaaggaauccuugcaaauuugaaauucgaggucauugcuugaaugguaagaggugucauuuuagucauaauuauuuugaauggccaccccaugcacugcuuguaagacaaaacuuuauguuaaacagaauacuuaagucuauggauaaaagcauagauacuuuaucagaaauaaguggagcugcagaguuggacagaacugaagaguaugcccucgguguaguuggagugcuagagaguuauauaggaucaauaaauaauauaacuaaacaaucagcauguguugccaugagcaaacuccucacugaacucaacagugaugacaucaaaaaacuaagagauaaugaagagccaaauucaccuaagauaagaguguacaauacugucauaucauauauugaaagcaacaggaaaaacaauaaacaaacuauccaucuguuaaaaagauugccagcagacguauugaagaaaaccaucaaaaacacauuggauauccacaagagcauaaccaucaacaacccaaaagaaucaacuguuaaugauacaaaugaccaugccaaaaauaaugauacuaccugaggacuaguaauaaggaaacuguaugaaugucugugggcaggaagugaagagauccuucuguaaagguuuuuggaauuaugucugcugaauaauaaacuuuuuugaaauaauaaaucugguagaaaaaugagaucuaaaaaaaaaaaaaaaaaaaaaaaaaaaaaaaaaaaaaaaaaaaaaaaaaaaaaaaaaaaaaaaaugcaucccccccccccccccccccccccccccccccaaaggcucuuuucagagccaccagaauu

SEQ ID NO: 21241 - RNA, 947 nt, Artificial Sequence
  mRNA product Design g-5 comprising derived and/or modified sequence from HRSV(Memphis-37)__AIY60641.1__M2-1 (opt1)
gggagacccgugacccggaaguuguacggcuacgcgacuuucccucccacaaacccucgcgcccuuccuuuccuacuugggcccggcagaaagcuuaccaugagccgccggaaccccugcaaguucgagauccgcggccacugccugaacgggaagcggugccacuucucccacaacuacuucgaguggccgccccacgcccuccuggugcgccagaacuucaugcugaaccggauccucaagagcauggacaaguccaucgacacccugagcgagaucuccggcgccgcggagcuggaccgcaccgaggaguacgcccucggggucgugggcgugcuggagagcuacaucggguccaucaacaacaucacgaagcagagcgccugcgucgccauguccaagcugcucaccgagcugaacagcgacgacaucaagaagcugcgggacaacgaggagcccaacucccccaagauccgcguguacaacaccgugaucagcuacaucgaguccaaccggaagaacaacaagcagaccauccaccuccugaagcgccugccggccgacguccucaagaagacgaucaagaacacccuggacauccacaagagcaucaccaucaacaaccccaaggaguccaccgugaacgacacgaacgaccacgcgaagaacaacgacaccaccugaggacuaguaauaaggaaacuguaugaaugucugugggcaggaagugaagagauccuucuguaaagguuuuuggaauuaugucugcugaauaauaaacuuuuuugaaauaauaaaucugguagaaaaaugagaucuaaaaaaaaaaaaaaaaaaaaaaaaaaaaaaaaaaaaaaaaaaaaaaaaaaaaaaaaaaaaaaaaugcaucccccccccccccccccccccccccccccccaaaggcucuuuucagagccaccagaauu

SEQ ID NO: 21242 - RNA, 947 nt, Artificial Sequence
  mRNA product Design g-5 comprising derived and/or modified sequence from HRSV(Memphis-37)__AIY60641.1__M2-1 (opt2)
gggagacccgugacccggaaguuguacggcuacgcgacuuucccucccacaaacccucgcgcccuuccuuuccuacuugggcccggcagaaagcuuaccaugucccgccgcaaccccugcaaguucgagauccgcggccacugccucaacggcaagcgcugccacuucucccacaacuacuucgaguggcccccccacgcccuccucguccgccagaacuucaugcucaaccgcauccucaaguccauggacaaguccaucgacacccucuccgagaucuccggcgccgccgagcucgaccgcaccgaggaguacgcccucggcgucgucggcguccucgaguccuacaucggcuccaucaacaacaucaccaagcaguccgccugcgucgccauguccaagcuccucaccgagcucaacuccgacgacaucaagaagcuccgcgacaacgaggagcccaacucccccaagauccgcgucuacaacaccgucaucuccuacaucgaguccaaccgcaagaacaacaagcagaccauccaccuccucaagcgccuccccgccgacguccucaagaagaccaucaagaacacccucgacauccacaaguccaucaccaucaacaaccccaaggaguccaccgucaacgacaccaacgaccacgccaagaacaacgacaccaccugaggacuaguaauaaggaaacuguaugaaugucugugggcaggaagugaagagauccuucuguaaagguuuuuggaauuaugucugcugaauaauaaacuuuuuugaaauaauaaaucugguagaaaaaugagaucuaaaaaaaaaaaaaaaaaaaaaaaaaaaaaaaaaaaaaaaaaaaaaaaaaaaaaaaaaaaaaaaaugcaucccccccccccccccccccccccccccccccaaaggcucuuuucagagccaccagaauu

SEQ ID NO: 21243 - RNA, 947 nt, Artificial Sequence
  mRNA product Design g-5 comprising derived and/or modified sequence from HRSV(Memphis-37)__AIY60641.1__M2-1 (opt3)
gggagacccgugacccggaaguuguacggcuacgcgacuuucccucccacaaacccucgcgcccuuccuuuccuacuugggcccggcagaaagcuuaccaugagcagaaggaaccccugcaaguucgagauccggggccacugucugaaugggaaacgcugccauuuuucccacaacuacuucgaauggccuccacaugcacuccuugugcgacagaauuuuaugcugaaccguauuuugaagucuauggacaaaucaauagauaccuuaagugagaucagcggagcugcagaacuggacagaacagaggaauaugcccuaggugucguuggcgugcucgaguccuacauugggucuaucaauaacauuacuaagcaaucggcguguguagcuaugucaaaacugcuuacggagcugaauagcgaugacaucaagaaguugagggauaacgaggaaccgaauagucccaaaauacggguguauaacaccgucaucuccuacauugaaucuaaucgcaagaacaauaaacagacaauccaccuccugaagagacugccugccgacgugcucaaaaagacuauuaagaacaccuuagauauccauaaaagcauaacaauuaauaacccaaaggaguccaccguuaacgacacuaaugaucacgccaaaaacaaugacacaaccugaggacuaguaauaaggaaacuguaugaaugucugugggcaggaagugaagagauccuucuguaaagguuuuuggaauuaugucugcugaauaauaaacuuuuuugaaauaauaaaucugguagaaaaaugagaucuaaaaaaaaaaaaaaaaaaaaaaaaaaaaaaaaaaaaaaaaaaaaaaaaaaaaaaaaaaaaaaaaugcaucccccccccccccccccccccccccccccccaaaggcucuuuucagagccaccagaauu

SEQ ID NO: 21244 - RNA, 947 nt, Artificial Sequence
  mRNA product Design g-5 comprising derived and/or modified sequence from HRSV(Memphis-37)__AIY60641.1__M2-1 (opt4)
gggagacccgugacccggaaguuguacggcuacgcgacuuucccucccacaaacccucgcgcccuuccuuuccuacuugggcccggcagaaagcuuaccaugagcagaagaaaccccugcaaguucgagaucagaggccacugccugaacggcaagagaugccacuucagccacaacuacuucgaguggcccccccacgcccugcuggugagacagaacuucaugcugaacagaauccugaagagcauggacaagagcaucgacacccugagcgagaucagcggcgccgccgagcuggacagaaccgaggaguacgcccugggcguggugggcgugcuggagagcuacaucggcagcaucaacaacaucaccaagcagagcgccugcguggccaugagcaagcugcugaccgagcugaacagcgacgacaucaagaagcugagagacaacgaggagcccaacagccccaagaucagaguguacaacaccgugaucagcuacaucgagagcaacagaaagaacaacaagcagaccauccaccugcugaagagacugcccgccgacgugcugaagaagaccaucaagaacacccuggacauccacaagagcaucaccaucaacaaccccaaggagagcaccgugaacgacaccaacgaccacgccaagaacaacgacaccaccugaggacuaguaauaaggaaacuguaugaaugucugugggcaggaagugaagagauccuucuguaaagguuuuuggaauuaugucugcugaauaauaaacuuuuuugaaauaauaaaucugguagaaaaaugagaucuaaaaaaaaaaaaaaaaaaaaaaaaaaaaaaaaaaaaaaaaaaaaaaaaaaaaaaaaaaaaaaaaugcaucccccccccccccccccccccccccccccccaaaggcucuuuucagagccaccagaauu

SEQ ID NO: 21245 - RNA, 947 nt, Artificial Sequence
  mRNA product Design g-5 comprising derived and/or modified sequence from HRSV(Memphis-37)__AIY60641.1__M2-1 (opt5)
gggagacccgugacccggaaguuguacggcuacgcgacuuucccucccacaaacccucgcgcccuuccuuuccuacuugggcccggcagaaagcuuaccaugagcagacggaaccccugcaaguucgagauccgcggccacugucugaaugggaaaagaugccauuuuucccacaacuacuucgaauggccuccgcaugcccuccuggugcggcagaauuuuaugcuuaaccgcauucugaagucuauggacaaaagcaucgauacccucuccgagauuucuggagcugccgaacuggacagaacagaggaauaugcgcuuggcgucguuggggugcuggagagcuacaucggauccauuaauaacaucacgaagcaaucugcuuguguggccaugagcaaacuccugaccgagcucaauuccgaugacaucaagaagcugcgggauaacgaggaacccaauagcccuaaaauucgcgucuauaacacagugaucucuuacauugaauccaauagaaagaacaauaaacagaccauccaucugcuuaagcggcugcccgccgacguucucaaaaagacaauuaagaacacccuggauauccacaaaagcauuacaaucaauaacccuaaggagucuaccgugaacgacacgaaugaucacgcuaaaaacaaugacaccacaugaggacuaguaauaaggaaacuguaugaaugucugugggcaggaagugaagagauccuucuguaaagguuuuuggaauuaugucugcugaauaauaaacuuuuuugaaauaauaaaucugguagaaaaaugagaucuaaaaaaaaaaaaaaaaaaaaaaaaaaaaaaaaaaaaaaaaaaaaaaaaaaaaaaaaaaaaaaaaugcaucccccccccccccccccccccccccccccccaaaggcucuuuucagagccaccagaauu

SEQ ID NO: 21246 - RNA, 947 nt, Artificial Sequence
  mRNA product Design g-5 comprising derived and/or modified sequence from HRSV(Memphis-37)__AIY60641.1__M2-1 (opt6)
gggagacccgugacccggaaguuguacggcuacgcgacuuucccucccacaaacccucgcgcccuuccuuuccuacuugggcccggcagaaagcuuaccauguccagacgaaacccaugcaaauucgaaauaagaggacacugccuaaacggaaaaagaugccacuucucacacaacuacuucgaauggccaccacacgcacuccucguaagacaaaacuucaugcuaaacagaauacuaaaaucaauggacaaaucaauagacacacucucagaaauaucaggagcagcagaacuagaccgaacagaagaauacgcacuaggaguaguaggaguacuagaauccuacauaggaucaauaaacaacauaacaaaacaaucagcaugcguagcaaugucaaaacuacuaacagaauuaaacucagacgacauaaaaaaacuaagagacaacgaagaaccaaacucaccaaaaauaagaguauacaacaccguaauaucauacauagaaucaaacagaaaaaacaacaaacaaacaauacaccuacuaaaaagacuaccagcagacguccuaaaaaaaacaauaaaaaacacacucgacauacacaaaucaauaaccauaaacaacccaaaagaaucaacaguaaacgacaccaacgaccacgcaaaaaacaaugacacaacauaaggacuaguaauaaggaaacuguaugaaugucugugggcaggaagugaagagauccuucuguaaagguuuuuggaauuaugucugcugaauaauaaacuuuuuugaaauaauaaaucugguagaaaaaugagaucuaaaaaaaaaaaaaaaaaaaaaaaaaaaaaaaaaaaaaaaaaaaaaaaaaaaaaaaaaaaaaaaaugcaucccccccccccccccccccccccccccccccaaaggcucuuuucagagccaccagaauu

SEQ ID NO: 21247 - RNA, 947 nt, Artificial Sequence
  mRNA product Design g-5 comprising derived and/or modified sequence from HRSV(Memphis-37)__AIY60641.1__M2-1 (opt11)
gggagacccgugacccggaaguuguacggcuacgcgacuuucccucccacaaacccucgcgcccuuccuuuccuacuugggcccggcagaaagcuuaccaugucccgacgcaaccccugcaaauucgaaauccgaggccacugccucaacggcaaacgcugccacuucucccacaacuacuucgaauggcccccccacgcccuccucguacgccaaaacuucaugcucaaccgaauccucaagucaauggacaaauccaucgacacccucuccgaaaucuccggcgccgccgaacucgaccgcaccgaagaauacgcccucggcgucgucggcguccucgaauccuacaucggcuccaucaacaacaucaccaaacaauccgccugcgucgccauguccaaacuccucaccgaacucaacuccgacgacaucaaaaaacuccgcgacaacgaagaacccaacucccccaaaauccgcgucuacaacaccguuaucuccuacaucgaauccaaccgaaaaaacaacaaacaaaccauccaccuccucaaacgacuccccgccgacguccucaaaaaaaccaucaaaaauacccuagacauccacaaauccaucaccaucaacaaccccaaagaauccaccgucaacgacaccaacgaccacgccaaaaacaacgacaccaccuaaggacuaguaauaaggaaacuguaugaaugucugugggcaggaagugaagagauccuucuguaaagguuuuuggaauuaugucugcugaauaauaaacuuuuuugaaauaauaaaucugguagaaaaaugagaucuaaaaaaaaaaaaaaaaaaaaaaaaaaaaaaaaaaaaaaaaaaaaaaaaaaaaaaaaaaaaaaaaugcaucccccccccccccccccccccccccccccccaaaggcucuuuucagagccaccagaauu

SEQ ID NO: 21248 - RNA, 963 nt, Artificial Sequence
  mRNA product Design h-1 comprising derived and/or modified sequence from HRSV(Memphis-37)__AIY60641.1__M2-1 (wt)
gggagacccgugacccggaaguuguacggcuacgcgacuuucccucccacaaacccucgcgcccuuccuuuccuacuugggcccggcagaaagcuuaccaugucacgaaggaauccuugcaaauuugaaauucgaggucauugcuugaaugguaagaggugucauuuuagucauaauuauuuugaauggccaccccaugcacugcuuguaagacaaaacuuuauguuaaacagaauacuuaagucuauggauaaaagcauagauacuuuaucagaaauaaguggagcugcagaguuggacagaacugaagaguaugcccucgguguaguuggagugcuagagaguuauauaggaucaauaaauaauauaacuaaacaaucagcauguguugccaugagcaaacuccucacugaacucaacagugaugacaucaaaaaacuaagagauaaugaagagccaaauucaccuaagauaagaguguacaauacugucauaucauauauugaaagcaacaggaaaaacaauaaacaaacuauccaucuguuaaaaagauugccagcagacguauugaagaaaaccaucaaaaacacauuggauauccacaagagcauaaccaucaacaacccaaaagaaucaacuguuaaugauacaaaugaccaugccaaaaauaaugauacuaccugaggacuaguacuggcugcaucucccuuuccucuguccuccauccuucucccaggauggugaagggggaccugguacccagugauccccaccccaggauccuaaaucaugacuuaccugcuaauaaaaacucauuggaaaagugagaagaucuaaaaaaaaaaaaaaaaaaaaaaaaaaaaaaaaaaaaaaaaaaaaaaaaaaaaaaaaaaaaaaaaugcaucccccccccccccccccccccccccccccccaaaggcucuuuucagagccaccagaauu

SEQ ID NO: 21249 - RNA, 963 nt, Artificial Sequence
  mRNA product Design h-1 comprising derived and/or modified sequence from HRSV(Memphis-37)__AIY60641.1__M2-1 (opt1)
gggagacccgugacccggaaguuguacggcuacgcgacuuucccucccacaaacccucgcgcccuuccuuuccuacuugggcccggcagaaagcuuaccaugagccgccggaaccccugcaaguucgagauccgcggccacugccugaacgggaagcggugccacuucucccacaacuacuucgaguggccgccccacgcccuccuggugcgccagaacuucaugcugaaccggauccucaagagcauggacaaguccaucgacacccugagcgagaucuccggcgccgcggagcuggaccgcaccgaggaguacgcccucggggucgugggcgugcuggagagcuacaucggguccaucaacaacaucacgaagcagagcgccugcgucgccauguccaagcugcucaccgagcugaacagcgacgacaucaagaagcugcgggacaacgaggagcccaacucccccaagauccgcguguacaacaccgugaucagcuacaucgaguccaaccggaagaacaacaagcagaccauccaccuccugaagcgccugccggccgacguccucaagaagacgaucaagaacacccuggacauccacaagagcaucaccaucaacaaccccaaggaguccaccgugaacgacacgaacgaccacgcgaagaacaacgacaccaccugaggacuaguacuggcugcaucucccuuuccucuguccuccauccuucucccaggauggugaagggggaccugguacccagugauccccaccccaggauccuaaaucaugacuuaccugcuaauaaaaacucauuggaaaagugagaagaucuaaaaaaaaaaaaaaaaaaaaaaaaaaaaaaaaaaaaaaaaaaaaaaaaaaaaaaaaaaaaaaaaugcaucccccccccccccccccccccccccccccccaaaggcucuuuucagagccaccagaauu

SEQ ID NO: 21250 - RNA, 963 nt, Artificial Sequence
  mRNA product Design h-1 comprising derived and/or modified sequence from HRSV(Memphis-37)__AIY60641.1__M2-1 (opt2)
gggagacccgugacccggaaguuguacggcuacgcgacuuucccucccacaaacccucgcgcccuuccuuuccuacuugggcccggcagaaagcuuaccaugucccgccgcaaccccugcaaguucgagauccgcggccacugccucaacggcaagcgcugccacuucucccacaacuacuucgaguggcccccccacgcccuccucguccgccagaacuucaugcucaaccgcauccucaaguccauggacaaguccaucgacacccucuccgagaucuccggcgccgccgagcucgaccgcaccgaggaguacgcccucggcgucgucggcguccucgaguccuacaucggcuccaucaacaacaucaccaagcaguccgccugcgucgccauguccaagcuccucaccgagcucaacuccgacgacaucaagaagcuccgcgacaacgaggagcccaacucccccaagauccgcgucuacaacaccgucaucuccuacaucgaguccaaccgcaagaacaacaagcagaccauccaccuccucaagcgccuccccgccgacguccucaagaagaccaucaagaacacccucgacauccacaaguccaucaccaucaacaaccccaaggaguccaccgucaacgacaccaacgaccacgccaagaacaacgacaccaccugaggacuaguacuggcugcaucucccuuuccucuguccuccauccuucucccaggauggugaagggggaccugguacccagugauccccaccccaggauccuaaaucaugacuuaccugcuaauaaaaacucauuggaaaagugagaagaucuaaaaaaaaaaaaaaaaaaaaaaaaaaaaaaaaaaaaaaaaaaaaaaaaaaaaaaaaaaaaaaaaugcaucccccccccccccccccccccccccccccccaaaggcucuuuucagagccaccagaauu

SEQ ID NO: 21251 - RNA, 963 nt, Artificial Sequence
  mRNA product Design h-1 comprising derived and/or modified sequence from HRSV(Memphis-37)__AIY60641.1__M2-1 (opt3)
gggagacccgugacccggaaguuguacggcuacgcgacuuucccucccacaaacccucgcgcccuuccuuuccuacuugggcccggcagaaagcuuaccaugagcagaaggaaccccugcaaguucgagauccggggccacugucugaaugggaaacgcugccauuuuucccacaacuacuucgaauggccuccacaugcacuccuugugcgacagaauuuuaugcugaaccguauuuugaagucuauggacaaaucaauagauaccuuaagugagaucagcggagcugcagaacuggacagaacagaggaauaugcccuaggugucguuggcgugcucgaguccuacauugggucuaucaauaacauuacuaagcaaucggcguguguagcuaugucaaaacugcuuacggagcugaauagcgaugacaucaagaaguugagggauaacgaggaaccgaauagucccaaaauacggguguauaacaccgucaucuccuacauugaaucuaaucgcaagaacaauaaacagacaauccaccuccugaagagacugccugccgacgugcucaaaaagacuauuaagaacaccuuagauauccauaaaagcauaacaauuaauaacccaaaggaguccaccguuaacgacacuaaugaucacgccaaaaacaaugacacaaccugaggacuaguacuggcugcaucucccuuuccucuguccuccauccuucucccaggauggugaagggggaccugguacccagugauccccaccccaggauccuaaaucaugacuuaccugcuaauaaaaacucauuggaaaagugagaagaucuaaaaaaaaaaaaaaaaaaaaaaaaaaaaaaaaaaaaaaaaaaaaaaaaaaaaaaaaaaaaaaaaugcaucccccccccccccccccccccccccccccccaaaggcucuuuucagagccaccagaauu

SEQ ID NO: 21252 - RNA, 963 nt, Artificial Sequence
  mRNA product Design h-1 comprising derived and/or modified sequence from HRSV(Memphis-37)__AIY60641.1__M2-1 (opt4)
gggagacccgugacccggaaguuguacggcuacgcgacuuucccucccacaaacccucgcgcccuuccuuuccuacuugggcccggcagaaagcuuaccaugagcagaagaaaccccugcaaguucgagaucagaggccacugccugaacggcaagagaugccacuucagccacaacuacuucgaguggcccccccacgcccugcuggugagacagaacuucaugcugaacagaauccugaagagcauggacaagagcaucgacacccugagcgagaucagcggcgccgccgagcuggacagaaccgaggaguacgcccugggcguggugggcgugcuggagagcuacaucggcagcaucaacaacaucaccaagcagagcgccugcguggccaugagcaagcugcugaccgagcugaacagcgacgacaucaagaagcugagagacaacgaggagcccaacagccccaagaucagaguguacaacaccgugaucagcuacaucgagagcaacagaaagaacaacaagcagaccauccaccugcugaagagacugcccgccgacgugcugaagaagaccaucaagaacacccuggacauccacaagagcaucaccaucaacaaccccaaggagagcaccgugaacgacaccaacgaccacgccaagaacaacgacaccaccugaggacuaguacuggcugcaucucccuuuccucuguccuccauccuucucccaggauggugaagggggaccugguacccagugauccccaccccaggauccuaaaucaugacuuaccugcuaauaaaaacucauuggaaaagugagaagaucuaaaaaaaaaaaaaaaaaaaaaaaaaaaaaaaaaaaaaaaaaaaaaaaaaaaaaaaaaaaaaaaaugcaucccccccccccccccccccccccccccccccaaaggcucuuuucagagccaccagaauu

SEQ ID NO: 21253 - RNA, 963 nt, Artificial Sequence
  mRNA product Design h-1 comprising derived and/or modified sequence from HRSV(Memphis-37)__AIY60641.1__M2-1 (opt5)
gggagacccgugacccggaaguuguacggcuacgcgacuuucccucccacaaacccucgcgcccuuccuuuccuacuugggcccggcagaaagcuuaccaugagcagacggaaccccugcaaguucgagauccgcggccacugucugaaugggaaaagaugccauuuuucccacaacuacuucgaauggccuccgcaugcccuccuggugcggcagaauuuuaugcuuaaccgcauucugaagucuauggacaaaagcaucgauacccucuccgagauuucuggagcugccgaacuggacagaacagaggaauaugcgcuuggcgucguuggggugcuggagagcuacaucggauccauuaauaacaucacgaagcaaucugcuuguguggccaugagcaaacuccugaccgagcucaauuccgaugacaucaagaagcugcgggauaacgaggaacccaauagcccuaaaauucgcgucuauaacacagugaucucuuacauugaauccaauagaaagaacaauaaacagaccauccaucugcuuaagcggcugcccgccgacguucucaaaaagacaauuaagaacacccuggauauccacaaaagcauuacaaucaauaacccuaaggagucuaccgugaacgacacgaaugaucacgcuaaaaacaaugacaccacaugaggacuaguacuggcugcaucucccuuuccucuguccuccauccuucucccaggauggugaagggggaccugguacccagugauccccaccccaggauccuaaaucaugacuuaccugcuaauaaaaacucauuggaaaagugagaagaucuaaaaaaaaaaaaaaaaaaaaaaaaaaaaaaaaaaaaaaaaaaaaaaaaaaaaaaaaaaaaaaaaugcaucccccccccccccccccccccccccccccccaaaggcucuuuucagagccaccagaauu

SEQ ID NO: 21254 - RNA, 963 nt, Artificial Sequence
  mRNA product Design h-1 comprising derived and/or modified sequence from HRSV(Memphis-37)__AIY60641.1__M2-1 (opt6)
gggagacccgugacccggaaguuguacggcuacgcgacuuucccucccacaaacccucgcgcccuuccuuuccuacuugggcccggcagaaagcuuaccauguccagacgaaacccaugcaaauucgaaauaagaggacacugccuaaacggaaaaagaugccacuucucacacaacuacuucgaauggccaccacacgcacuccucguaagacaaaacuucaugcuaaacagaauacuaaaaucaauggacaaaucaauagacacacucucagaaauaucaggagcagcagaacuagaccgaacagaagaauacgcacuaggaguaguaggaguacuagaauccuacauaggaucaauaaacaacauaacaaaacaaucagcaugcguagcaaugucaaaacuacuaacagaauuaaacucagacgacauaaaaaaacuaagagacaacgaagaaccaaacucaccaaaaauaagaguauacaacaccguaauaucauacauagaaucaaacagaaaaaacaacaaacaaacaauacaccuacuaaaaagacuaccagcagacguccuaaaaaaaacaauaaaaaacacacucgacauacacaaaucaauaaccauaaacaacccaaaagaaucaacaguaaacgacaccaacgaccacgcaaaaaacaaugacacaacauaaggacuaguacuggcugcaucucccuuuccucuguccuccauccuucucccaggauggugaagggggaccugguacccagugauccccaccccaggauccuaaaucaugacuuaccugcuaauaaaaacucauuggaaaagugagaagaucuaaaaaaaaaaaaaaaaaaaaaaaaaaaaaaaaaaaaaaaaaaaaaaaaaaaaaaaaaaaaaaaaugcaucccccccccccccccccccccccccccccccaaaggcucuuuucagagccaccagaauu

SEQ ID NO: 21255 - RNA, 963 nt, Artificial Sequence
  mRNA product Design h-1 comprising derived and/or modified sequence from HRSV(Memphis-37)__AIY60641.1__M2-1 (opt11)
gggagacccgugacccggaaguuguacggcuacgcgacuuucccucccacaaacccucgcgcccuuccuuuccuacuugggcccggcagaaagcuuaccaugucccgacgcaaccccugcaaauucgaaauccgaggccacugccucaacggcaaacgcugccacuucucccacaacuacuucgaauggcccccccacgcccuccucguacgccaaaacuucaugcucaaccgaauccucaagucaauggacaaauccaucgacacccucuccgaaaucuccggcgccgccgaacucgaccgcaccgaagaauacgcccucggcgucgucggcguccucgaauccuacaucggcuccaucaacaacaucaccaaacaauccgccugcgucgccauguccaaacuccucaccgaacucaacuccgacgacaucaaaaaacuccgcgacaacgaagaacccaacucccccaaaauccgcgucuacaacaccguuaucuccuacaucgaauccaaccgaaaaaacaacaaacaaaccauccaccuccucaaacgacuccccgccgacguccucaaaaaaaccaucaaaaauacccuagacauccacaaauccaucaccaucaacaaccccaaagaauccaccgucaacgacaccaacgaccacgccaaaaacaacgacaccaccuaaggacuaguacuggcugcaucucccuuuccucuguccuccauccuucucccaggauggugaagggggaccugguacccagugauccccaccccaggauccuaaaucaugacuuaccugcuaauaaaaacucauuggaaaagugagaagaucuaaaaaaaaaaaaaaaaaaaaaaaaaaaaaaaaaaaaaaaaaaaaaaaaaaaaaaaaaaaaaaaaugcaucccccccccccccccccccccccccccccccaaaggcucuuuucagagccaccagaauu

SEQ ID NO: 21256 - RNA, 1179 nt, Artificial Sequence
  mRNA product Design h-2 comprising derived and/or modified sequence from HRSV(Memphis-37)__AIY60641.1__M2-1 (wt)
gggagacccgugacccggaaguuguacggcuacgcgacuuucccucccacaaacccucgcgcccuuccuuuccuacuugggcccggcagaaagcuuaccaugucacgaaggaauccuugcaaauuugaaauucgaggucauugcuugaaugguaagaggugucauuuuagucauaauuauuuugaauggccaccccaugcacugcuuguaagacaaaacuuuauguuaaacagaauacuuaagucuauggauaaaagcauagauacuuuaucagaaauaaguggagcugcagaguuggacagaacugaagaguaugcccucgguguaguuggagugcuagagaguuauauaggaucaauaaauaauauaacuaaacaaucagcauguguugccaugagcaaacuccucacugaacucaacagugaugacaucaaaaaacuaagagauaaugaagagccaaauucaccuaagauaagaguguacaauacugucauaucauauauugaaagcaacaggaaaaacaauaaacaaacuauccaucuguuaaaaagauugccagcagacguauugaagaaaaccaucaaaaacacauuggauauccacaagagcauaaccaucaacaacccaaaagaaucaacuguuaaugauacaaaugaccaugccaaaaauaaugauacuaccugaggacuagugaagggaacacccaaauuuaauucagccuuaagcacaauuaauuaagagugaaacguaauuguacaagcaguuggucacccaccauagggcaugaucaacaccgcaaccuuuccuuuuucccccagugauucugaaaaaccccucuucccuucagcuugcuuagauguuccaaauuuaguaagcuuaaggcggccuacagaagaaaaagaaaaaaaaggccacaaaaguucccucucacuuucaguaaauaaaauaaaagcagcaacagaaauaaagaaauaaaugaaauucaaaaugaaauaaauauuguguugugcagcauuaaaaaaucaauaaaaauuaaaaaugagcaagaucuaaaaaaaaaaaaaaaaaaaaaaaaaaaaaaaaaaaaaaaaaaaaaaaaaaaaaaaaaaaaaaaaugcaucccccccccccccccccccccccccccccccaaaggcucuuuucagagccaccagaauu

SEQ ID NO: 21257 - RNA, 1179 nt, Artificial Sequence
  mRNA product Design h-2 comprising derived and/or modified sequence from HRSV(Memphis-37)__AIY60641.1__M2-1 (opt1)
gggagacccgugacccggaaguuguacggcuacgcgacuuucccucccacaaacccucgcgcccuuccuuuccuacuugggcccggcagaaagcuuaccaugagccgccggaaccccugcaaguucgagauccgcggccacugccugaacgggaagcggugccacuucucccacaacuacuucgaguggccgccccacgcccuccuggugcgccagaacuucaugcugaaccggauccucaagagcauggacaaguccaucgacacccugagcgagaucuccggcgccgcggagcuggaccgcaccgaggaguacgcccucggggucgugggcgugcuggagagcuacaucggguccaucaacaacaucacgaagcagagcgccugcgucgccauguccaagcugcucaccgagcugaacagcgacgacaucaagaagcugcgggacaacgaggagcccaacucccccaagauccgcguguacaacaccgugaucagcuacaucgaguccaaccggaagaacaacaagcagaccauccaccuccugaagcgccugccggccgacguccucaagaagacgaucaagaacacccuggacauccacaagagcaucaccaucaacaaccccaaggaguccaccgugaacgacacgaacgaccacgcgaagaacaacgacaccaccugaggacuagugaagggaacacccaaauuuaauucagccuuaagcacaauuaauuaagagugaaacguaauuguacaagcaguuggucacccaccauagggcaugaucaacaccgcaaccuuuccuuuuucccccagugauucugaaaaaccccucuucccuucagcuugcuuagauguuccaaauuuaguaagcuuaaggcggccuacagaagaaaaagaaaaaaaaggccacaaaaguucccucucacuuucaguaaauaaaauaaaagcagcaacagaaauaaagaaauaaaugaaauucaaaaugaaauaaauauuguguugugcagcauuaaaaaaucaauaaaaauuaaaaaugagcaagaucuaaaaaaaaaaaaaaaaaaaaaaaaaaaaaaaaaaaaaaaaaaaaaaaaaaaaaaaaaaaaaaaaugcaucccccccccccccccccccccccccccccccaaaggcucuuuucagagccaccagaauu

SEQ ID NO: 21258 - RNA, 1179 nt, Artificial Sequence
  mRNA product Design h-2 comprising derived and/or modified sequence from HRSV(Memphis-37)__AIY60641.1__M2-1 (opt2)
gggagacccgugacccggaaguuguacggcuacgcgacuuucccucccacaaacccucgcgcccuuccuuuccuacuugggcccggcagaaagcuuaccaugucccgccgcaaccccugcaaguucgagauccgcggccacugccucaacggcaagcgcugccacuucucccacaacuacuucgaguggcccccccacgcccuccucguccgccagaacuucaugcucaaccgcauccucaaguccauggacaaguccaucgacacccucuccgagaucuccggcgccgccgagcucgaccgcaccgaggaguacgcccucggcgucgucggcguccucgaguccuacaucggcuccaucaacaacaucaccaagcaguccgccugcgucgccauguccaagcuccucaccgagcucaacuccgacgacaucaagaagcuccgcgacaacgaggagcccaacucccccaagauccgcgucuacaacaccgucaucuccuacaucgaguccaaccgcaagaacaacaagcagaccauccaccuccucaagcgccuccccgccgacguccucaagaagaccaucaagaacacccucgacauccacaaguccaucaccaucaacaaccccaaggaguccaccgucaacgacaccaacgaccacgccaagaacaacgacaccaccugaggacuagugaagggaacacccaaauuuaauucagccuuaagcacaauuaauuaagagugaaacguaauuguacaagcaguuggucacccaccauagggcaugaucaacaccgcaaccuuuccuuuuucccccagugauucugaaaaaccccucuucccuucagcuugcuuagauguuccaaauuuaguaagcuuaaggcggccuacagaagaaaaagaaaaaaaaggccacaaaaguucccucucacuuucaguaaauaaaauaaaagcagcaacagaaauaaagaaauaaaugaaauucaaaaugaaauaaauauuguguugugcagcauuaaaaaaucaauaaaaauuaaaaaugagcaagaucuaaaaaaaaaaaaaaaaaaaaaaaaaaaaaaaaaaaaaaaaaaaaaaaaaaaaaaaaaaaaaaaaugcaucccccccccccccccccccccccccccccccaaaggcucuuuucagagccaccagaauu

SEQ ID NO: 21259 - RNA, 1179 nt, Artificial Sequence
  mRNA product Design h-2 comprising derived and/or modified sequence from HRSV(Memphis-37)__AIY60641.1__M2-1 (opt3)
gggagacccgugacccggaaguuguacggcuacgcgacuuucccucccacaaacccucgcgcccuuccuuuccuacuugggcccggcagaaagcuuaccaugagcagaaggaaccccugcaaguucgagauccggggccacugucugaaugggaaacgcugccauuuuucccacaacuacuucgaauggccuccacaugcacuccuugugcgacagaauuuuaugcugaaccguauuuugaagucuauggacaaaucaauagauaccuuaagugagaucagcggagcugcagaacuggacagaacagaggaauaugcccuaggugucguuggcgugcucgaguccuacauugggucuaucaauaacauuacuaagcaaucggcguguguagcuaugucaaaacugcuuacggagcugaauagcgaugacaucaagaaguugagggauaacgaggaaccgaauagucccaaaauacggguguauaacaccgucaucuccuacauugaaucuaaucgcaagaacaauaaacagacaauccaccuccugaagagacugccugccgacgugcucaaaaagacuauuaagaacaccuuagauauccauaaaagcauaacaauuaauaacccaaaggaguccaccguuaacgacacuaaugaucacgccaaaaacaaugacacaaccugaggacuagugaagggaacacccaaauuuaauucagccuuaagcacaauuaauuaagagugaaacguaauuguacaagcaguuggucacccaccauagggcaugaucaacaccgcaaccuuuccuuuuucccccagugauucugaaaaaccccucuucccuucagcuugcuuagauguuccaaauuuaguaagcuuaaggcggccuacagaagaaaaagaaaaaaaaggccacaaaaguucccucucacuuucaguaaauaaaauaaaagcagcaacagaaauaaagaaauaaaugaaauucaaaaugaaauaaauauuguguugugcagcauuaaaaaaucaauaaaaauuaaaaaugagcaagaucuaaaaaaaaaaaaaaaaaaaaaaaaaaaaaaaaaaaaaaaaaaaaaaaaaaaaaaaaaaaaaaaaugcaucccccccccccccccccccccccccccccccaaaggcucuuuucagagccaccagaauu

SEQ ID NO: 21260 - RNA, 1179 nt, Artificial Sequence
  mRNA product Design h-2 comprising derived and/or modified sequence from HRSV(Memphis-37)__AIY60641.1__M2-1 (opt4)
gggagacccgugacccggaaguuguacggcuacgcgacuuucccucccacaaacccucgcgcccuuccuuuccuacuugggcccggcagaaagcuuaccaugagcagaagaaaccccugcaaguucgagaucagaggccacugccugaacggcaagagaugccacuucagccacaacuacuucgaguggcccccccacgcccugcuggugagacagaacuucaugcugaacagaauccugaagagcauggacaagagcaucgacacccugagcgagaucagcggcgccgccgagcuggacagaaccgaggaguacgcccugggcguggugggcgugcuggagagcuacaucggcagcaucaacaacaucaccaagcagagcgccugcguggccaugagcaagcugcugaccgagcugaacagcgacgacaucaagaagcugagagacaacgaggagcccaacagccccaagaucagaguguacaacaccgugaucagcuacaucgagagcaacagaaagaacaacaagcagaccauccaccugcugaagagacugcccgccgacgugcugaagaagaccaucaagaacacccuggacauccacaagagcaucaccaucaacaaccccaaggagagcaccgugaacgacaccaacgaccacgccaagaacaacgacaccaccugaggacuagugaagggaacacccaaauuuaauucagccuuaagcacaauuaauuaagagugaaacguaauuguacaagcaguuggucacccaccauagggcaugaucaacaccgcaaccuuuccuuuuucccccagugauucugaaaaaccccucuucccuucagcuugcuuagauguuccaaauuuaguaagcuuaaggcggccuacagaagaaaaagaaaaaaaaggccacaaaaguucccucucacuuucaguaaauaaaauaaaagcagcaacagaaauaaagaaauaaaugaaauucaaaaugaaauaaauauuguguugugcagcauuaaaaaaucaauaaaaauuaaaaaugagcaagaucuaaaaaaaaaaaaaaaaaaaaaaaaaaaaaaaaaaaaaaaaaaaaaaaaaaaaaaaaaaaaaaaaugcaucccccccccccccccccccccccccccccccaaaggcucuuuucagagccaccagaauu

SEQ ID NO: 21261 - RNA, 1179 nt, Artificial Sequence
  mRNA product Design h-2 comprising derived and/or modified sequence from HRSV(Memphis-37)__AIY60641.1__M2-1 (opt5)
gggagacccgugacccggaaguuguacggcuacgcgacuuucccucccacaaacccucgcgcccuuccuuuccuacuugggcccggcagaaagcuuaccaugagcagacggaaccccugcaaguucgagauccgcggccacugucugaaugggaaaagaugccauuuuucccacaacuacuucgaauggccuccgcaugcccuccuggugcggcagaauuuuaugcuuaaccgcauucugaagucuauggacaaaagcaucgauacccucuccgagauuucuggagcugccgaacuggacagaacagaggaauaugcgcuuggcgucguuggggugcuggagagcuacaucggauccauuaauaacaucacgaagcaaucugcuuguguggccaugagcaaacuccugaccgagcucaauuccgaugacaucaagaagcugcgggauaacgaggaacccaauagcccuaaaauucgcgucuauaacacagugaucucuuacauugaauccaauagaaagaacaauaaacagaccauccaucugcuuaagcggcugcccgccgacguucucaaaaagacaauuaagaacacccuggauauccacaaaagcauuacaaucaauaacccuaaggagucuaccgugaacgacacgaaugaucacgcuaaaaacaaugacaccacaugaggacuagugaagggaacacccaaauuuaauucagccuuaagcacaauuaauuaagagugaaacguaauuguacaagcaguuggucacccaccauagggcaugaucaacaccgcaaccuuuccuuuuucccccagugauucugaaaaaccccucuucccuucagcuugcuuagauguuccaaauuuaguaagcuuaaggcggccuacagaagaaaaagaaaaaaaaggccacaaaaguucccucucacuuucaguaaauaaaauaaaagcagcaacagaaauaaagaaauaaaugaaauucaaaaugaaauaaauauuguguugugcagcauuaaaaaaucaauaaaaauuaaaaaugagcaagaucuaaaaaaaaaaaaaaaaaaaaaaaaaaaaaaaaaaaaaaaaaaaaaaaaaaaaaaaaaaaaaaaaugcaucccccccccccccccccccccccccccccccaaaggcucuuuucagagccaccagaauu

SEQ ID NO: 21262 - RNA, 1179 nt, Artificial Sequence
  mRNA product Design h-2 comprising derived and/or modified sequence from HRSV(Memphis-37)__AIY60641.1__M2-1 (opt6)
gggagacccgugacccggaaguuguacggcuacgcgacuuucccucccacaaacccucgcgcccuuccuuuccuacuugggcccggcagaaagcuuaccauguccagacgaaacccaugcaaauucgaaauaagaggacacugccuaaacggaaaaagaugccacuucucacacaacuacuucgaauggccaccacacgcacuccucguaagacaaaacuucaugcuaaacagaauacuaaaaucaauggacaaaucaauagacacacucucagaaauaucaggagcagcagaacuagaccgaacagaagaauacgcacuaggaguaguaggaguacuagaauccuacauaggaucaauaaacaacauaacaaaacaaucagcaugcguagcaaugucaaaacuacuaacagaauuaaacucagacgacauaaaaaaacuaagagacaacgaagaaccaaacucaccaaaaauaagaguauacaacaccguaauaucauacauagaaucaaacagaaaaaacaacaaacaaacaauacaccuacuaaaaagacuaccagcagacguccuaaaaaaaacaauaaaaaacacacucgacauacacaaaucaauaaccauaaacaacccaaaagaaucaacaguaaacgacaccaacgaccacgcaaaaaacaaugacacaacauaaggacuagugaagggaacacccaaauuuaauucagccuuaagcacaauuaauuaagagugaaacguaauuguacaagcaguuggucacccaccauagggcaugaucaacaccgcaaccuuuccuuuuucccccagugauucugaaaaaccccucuucccuucagcuugcuuagauguuccaaauuuaguaagcuuaaggcggccuacagaagaaaaagaaaaaaaaggccacaaaaguucccucucacuuucaguaaauaaaauaaaagcagcaacagaaauaaagaaauaaaugaaauucaaaaugaaauaaauauuguguugugcagcauuaaaaaaucaauaaaaauuaaaaaugagcaagaucuaaaaaaaaaaaaaaaaaaaaaaaaaaaaaaaaaaaaaaaaaaaaaaaaaaaaaaaaaaaaaaaaugcaucccccccccccccccccccccccccccccccaaaggcucuuuucagagccaccagaauu

SEQ ID NO: 21263 - RNA, 1179 nt, Artificial Sequence
  mRNA product Design h-2 comprising derived and/or modified sequence from HRSV(Memphis-37)__AIY60641.1__M2-1 (opt11)
gggagacccgugacccggaaguuguacggcuacgcgacuuucccucccacaaacccucgcgcccuuccuuuccuacuugggcccggcagaaagcuuaccaugucccgacgcaaccccugcaaauucgaaauccgaggccacugccucaacggcaaacgcugccacuucucccacaacuacuucgaauggcccccccacgcccuccucguacgccaaaacuucaugcucaaccgaauccucaagucaauggacaaauccaucgacacccucuccgaaaucuccggcgccgccgaacucgaccgcaccgaagaauacgcccucggcgucgucggcguccucgaauccuacaucggcuccaucaacaacaucaccaaacaauccgccugcgucgccauguccaaacuccucaccgaacucaacuccgacgacaucaaaaaacuccgcgacaacgaagaacccaacucccccaaaauccgcgucuacaacaccguuaucuccuacaucgaauccaaccgaaaaaacaacaaacaaaccauccaccuccucaaacgacuccccgccgacguccucaaaaaaaccaucaaaaauacccuagacauccacaaauccaucaccaucaacaaccccaaagaauccaccgucaacgacaccaacgaccacgccaaaaacaacgacaccaccuaaggacuagugaagggaacacccaaauuuaauucagccuuaagcacaauuaauuaagagugaaacguaauuguacaagcaguuggucacccaccauagggcaugaucaacaccgcaaccuuuccuuuuucccccagugauucugaaaaaccccucuucccuucagcuugcuuagauguuccaaauuuaguaagcuuaaggcggccuacagaagaaaaagaaaaaaaaggccacaaaaguucccucucacuuucaguaaauaaaauaaaagcagcaacagaaauaaagaaauaaaugaaauucaaaaugaaauaaauauuguguugugcagcauuaaaaaaucaauaaaaauuaaaaaugagcaagaucuaaaaaaaaaaaaaaaaaaaaaaaaaaaaaaaaaaaaaaaaaaaaaaaaaaaaaaaaaaaaaaaaugcaucccccccccccccccccccccccccccccccaaaggcucuuuucagagccaccagaauu

SEQ ID NO: 21264 - RNA, 959 nt, Artificial Sequence
  mRNA product Design h-3 comprising derived and/or modified sequence from HRSV(Memphis-37)__AIY60641.1__M2-1 (wt)
gggagacccgugacccggaaguuguacggcuacgcgacuuucccucccacaaacccucgcgcccuuccuuuccuacuugggcccggcagaaagcuuaccaugucacgaaggaauccuugcaaauuugaaauucgaggucauugcuugaaugguaagaggugucauuuuagucauaauuauuuugaauggccaccccaugcacugcuuguaagacaaaacuuuauguuaaacagaauacuuaagucuauggauaaaagcauagauacuuuaucagaaauaaguggagcugcagaguuggacagaacugaagaguaugcccucgguguaguuggagugcuagagaguuauauaggaucaauaaauaauauaacuaaacaaucagcauguguugccaugagcaaacuccucacugaacucaacagugaugacaucaaaaaacuaagagauaaugaagagccaaauucaccuaagauaagaguguacaauacugucauaucauauauugaaagcaacaggaaaaacaauaaacaaacuauccaucuguuaaaaagauugccagcagacguauugaagaaaaccaucaaaaacacauuggauauccacaagagcauaaccaucaacaacccaaaagaaucaacuguuaaugauacaaaugaccaugccaaaaauaaugauacuaccugaggacuaguggaagcauuuuccuggcugauuaaaagaaauuacucagcuauggucaucuguuccuguuagaaggcuaugcagcauauuauauacuaugcgcauguuaugaaaugcauaauaaaaaauuuuaaaaaaucuaaaagaucuaaaaaaaaaaaaaaaaaaaaaaaaaaaaaaaaaaaaaaaaaaaaaaaaaaaaaaaaaaaaaaaaugcaucccccccccccccccccccccccccccccccaaaggcucuuuucagagccaccagaauu

SEQ ID NO: 21265 - RNA, 959 nt, Artificial Sequence
  mRNA product Design h-3 comprising derived and/or modified sequence from HRSV(Memphis-37)__AIY60641.1__M2-1 (opt1)
gggagacccgugacccggaaguuguacggcuacgcgacuuucccucccacaaacccucgcgcccuuccuuuccuacuugggcccggcagaaagcuuaccaugagccgccggaaccccugcaaguucgagauccgcggccacugccugaacgggaagcggugccacuucucccacaacuacuucgaguggccgccccacgcccuccuggugcgccagaacuucaugcugaaccggauccucaagagcauggacaaguccaucgacacccugagcgagaucuccggcgccgcggagcuggaccgcaccgaggaguacgcccucggggucgugggcgugcuggagagcuacaucggguccaucaacaacaucacgaagcagagcgccugcgucgccauguccaagcugcucaccgagcugaacagcgacgacaucaagaagcugcgggacaacgaggagcccaacucccccaagauccgcguguacaacaccgugaucagcuacaucgaguccaaccggaagaacaacaagcagaccauccaccuccugaagcgccugccggccgacguccucaagaagacgaucaagaacacccuggacauccacaagagcaucaccaucaacaaccccaaggaguccaccgugaacgacacgaacgaccacgcgaagaacaacgacaccaccugaggacuaguggaagcauuuuccuggcugauuaaaagaaauuacucagcuauggucaucuguuccuguuagaaggcuaugcagcauauuauauacuaugcgcauguuaugaaaugcauaauaaaaaauuuuaaaaaaucuaaaagaucuaaaaaaaaaaaaaaaaaaaaaaaaaaaaaaaaaaaaaaaaaaaaaaaaaaaaaaaaaaaaaaaaugcaucccccccccccccccccccccccccccccccaaaggcucuuuucagagccaccagaauu

SEQ ID NO: 21266 - RNA, 959 nt, Artificial Sequence
  mRNA product Design h-3 comprising derived and/or modified sequence from HRSV(Memphis-37)__AIY60641.1__M2-1 (opt2)
gggagacccgugacccggaaguuguacggcuacgcgacuuucccucccacaaacccucgcgcccuuccuuuccuacuugggcccggcagaaagcuuaccaugucccgccgcaaccccugcaaguucgagauccgcggccacugccucaacggcaagcgcugccacuucucccacaacuacuucgaguggcccccccacgcccuccucguccgccagaacuucaugcucaaccgcauccucaaguccauggacaaguccaucgacacccucuccgagaucuccggcgccgccgagcucgaccgcaccgaggaguacgcccucggcgucgucggcguccucgaguccuacaucggcuccaucaacaacaucaccaagcaguccgccugcgucgccauguccaagcuccucaccgagcucaacuccgacgacaucaagaagcuccgcgacaacgaggagcccaacucccccaagauccgcgucuacaacaccgucaucuccuacaucgaguccaaccgcaagaacaacaagcagaccauccaccuccucaagcgccuccccgccgacguccucaagaagaccaucaagaacacccucgacauccacaaguccaucaccaucaacaaccccaaggaguccaccgucaacgacaccaacgaccacgccaagaacaacgacaccaccugaggacuaguggaagcauuuuccuggcugauuaaaagaaauuacucagcuauggucaucuguuccuguuagaaggcuaugcagcauauuauauacuaugcgcauguuaugaaaugcauaauaaaaaauuuuaaaaaaucuaaaagaucuaaaaaaaaaaaaaaaaaaaaaaaaaaaaaaaaaaaaaaaaaaaaaaaaaaaaaaaaaaaaaaaaugcaucccccccccccccccccccccccccccccccaaaggcucuuuucagagccaccagaauu

SEQ ID NO: 21267 - RNA, 959 nt, Artificial Sequence
  mRNA product Design h-3 comprising derived and/or modified sequence from HRSV(Memphis-37)__AIY60641.1__M2-1 (opt3)
gggagacccgugacccggaaguuguacggcuacgcgacuuucccucccacaaacccucgcgcccuuccuuuccuacuugggcccggcagaaagcuuaccaugagcagaaggaaccccugcaaguucgagauccggggccacugucugaaugggaaacgcugccauuuuucccacaacuacuucgaauggccuccacaugcacuccuugugcgacagaauuuuaugcugaaccguauuuugaagucuauggacaaaucaauagauaccuuaagugagaucagcggagcugcagaacuggacagaacagaggaauaugcccuaggugucguuggcgugcucgaguccuacauugggucuaucaauaacauuacuaagcaaucggcguguguagcuaugucaaaacugcuuacggagcugaauagcgaugacaucaagaaguugagggauaacgaggaaccgaauagucccaaaauacggguguauaacaccgucaucuccuacauugaaucuaaucgcaagaacaauaaacagacaauccaccuccugaagagacugccugccgacgugcucaaaaagacuauuaagaacaccuuagauauccauaaaagcauaacaauuaauaacccaaaggaguccaccguuaacgacacuaaugaucacgccaaaaacaaugacacaaccugaggacuaguggaagcauuuuccuggcugauuaaaagaaauuacucagcuauggucaucuguuccuguuagaaggcuaugcagcauauuauauacuaugcgcauguuaugaaaugcauaauaaaaaauuuuaaaaaaucuaaaagaucuaaaaaaaaaaaaaaaaaaaaaaaaaaaaaaaaaaaaaaaaaaaaaaaaaaaaaaaaaaaaaaaaugcaucccccccccccccccccccccccccccccccaaaggcucuuuucagagccaccagaauu

SEQ ID NO: 21268 - RNA, 959 nt, Artificial Sequence
  mRNA product Design h-3 comprising derived and/or modified sequence from HRSV(Memphis-37)__AIY60641.1__M2-1 (opt4)
gggagacccgugacccggaaguuguacggcuacgcgacuuucccucccacaaacccucgcgcccuuccuuuccuacuugggcccggcagaaagcuuaccaugagcagaagaaaccccugcaaguucgagaucagaggccacugccugaacggcaagagaugccacuucagccacaacuacuucgaguggcccccccacgcccugcuggugagacagaacuucaugcugaacagaauccugaagagcauggacaagagcaucgacacccugagcgagaucagcggcgccgccgagcuggacagaaccgaggaguacgcccugggcguggugggcgugcuggagagcuacaucggcagcaucaacaacaucaccaagcagagcgccugcguggccaugagcaagcugcugaccgagcugaacagcgacgacaucaagaagcugagagacaacgaggagcccaacagccccaagaucagaguguacaacaccgugaucagcuacaucgagagcaacagaaagaacaacaagcagaccauccaccugcugaagagacugcccgccgacgugcugaagaagaccaucaagaacacccuggacauccacaagagcaucaccaucaacaaccccaaggagagcaccgugaacgacaccaacgaccacgccaagaacaacgacaccaccugaggacuaguggaagcauuuuccuggcugauuaaaagaaauuacucagcuauggucaucuguuccuguuagaaggcuaugcagcauauuauauacuaugcgcauguuaugaaaugcauaauaaaaaauuuuaaaaaaucuaaaagaucuaaaaaaaaaaaaaaaaaaaaaaaaaaaaaaaaaaaaaaaaaaaaaaaaaaaaaaaaaaaaaaaaugcaucccccccccccccccccccccccccccccccaaaggcucuuuucagagccaccagaauu

SEQ ID NO: 21269 - RNA, 959 nt, Artificial Sequence
  mRNA product Design h-3 comprising derived and/or modified sequence from HRSV(Memphis-37)__AIY60641.1__M2-1 (opt5)
gggagacccgugacccggaaguuguacggcuacgcgacuuucccucccacaaacccucgcgcccuuccuuuccuacuugggcccggcagaaagcuuaccaugagcagacggaaccccugcaaguucgagauccgcggccacugucugaaugggaaaagaugccauuuuucccacaacuacuucgaauggccuccgcaugcccuccuggugcggcagaauuuuaugcuuaaccgcauucugaagucuauggacaaaagcaucgauacccucuccgagauuucuggagcugccgaacuggacagaacagaggaauaugcgcuuggcgucguuggggugcuggagagcuacaucggauccauuaauaacaucacgaagcaaucugcuuguguggccaugagcaaacuccugaccgagcucaauuccgaugacaucaagaagcugcgggauaacgaggaacccaauagcccuaaaauucgcgucuauaacacagugaucucuuacauugaauccaauagaaagaacaauaaacagaccauccaucugcuuaagcggcugcccgccgacguucucaaaaagacaauuaagaacacccuggauauccacaaaagcauuacaaucaauaacccuaaggagucuaccgugaacgacacgaaugaucacgcuaaaaacaaugacaccacaugaggacuaguggaagcauuuuccuggcugauuaaaagaaauuacucagcuauggucaucuguuccuguuagaaggcuaugcagcauauuauauacuaugcgcauguuaugaaaugcauaauaaaaaauuuuaaaaaaucuaaaagaucuaaaaaaaaaaaaaaaaaaaaaaaaaaaaaaaaaaaaaaaaaaaaaaaaaaaaaaaaaaaaaaaaugcaucccccccccccccccccccccccccccccccaaaggcucuuuucagagccaccagaauu

SEQ ID NO: 21270 - RNA, 959 nt, Artificial Sequence
  mRNA product Design h-3 comprising derived and/or modified sequence from HRSV(Memphis-37)__AIY60641.1__M2-1 (opt6)
gggagacccgugacccggaaguuguacggcuacgcgacuuucccucccacaaacccucgcgcccuuccuuuccuacuugggcccggcagaaagcuuaccauguccagacgaaacccaugcaaauucgaaauaagaggacacugccuaaacggaaaaagaugccacuucucacacaacuacuucgaauggccaccacacgcacuccucguaagacaaaacuucaugcuaaacagaauacuaaaaucaauggacaaaucaauagacacacucucagaaauaucaggagcagcagaacuagaccgaacagaagaauacgcacuaggaguaguaggaguacuagaauccuacauaggaucaauaaacaacauaacaaaacaaucagcaugcguagcaaugucaaaacuacuaacagaauuaaacucagacgacauaaaaaaacuaagagacaacgaagaaccaaacucaccaaaaauaagaguauacaacaccguaauaucauacauagaaucaaacagaaaaaacaacaaacaaacaauacaccuacuaaaaagacuaccagcagacguccuaaaaaaaacaauaaaaaacacacucgacauacacaaaucaauaaccauaaacaacccaaaagaaucaacaguaaacgacaccaacgaccacgcaaaaaacaaugacacaacauaaggacuaguggaagcauuuuccuggcugauuaaaagaaauuacucagcuauggucaucuguuccuguuagaaggcuaugcagcauauuauauacuaugcgcauguuaugaaaugcauaauaaaaaauuuuaaaaaaucuaaaagaucuaaaaaaaaaaaaaaaaaaaaaaaaaaaaaaaaaaaaaaaaaaaaaaaaaaaaaaaaaaaaaaaaugcaucccccccccccccccccccccccccccccccaaaggcucuuuucagagccaccagaauu

SEQ ID NO: 21271 - RNA, 959 nt, Artificial Sequence
  mRNA product Design h-3 comprising derived and/or modified sequence from HRSV(Memphis-37)__AIY60641.1__M2-1 (opt11)
gggagacccgugacccggaaguuguacggcuacgcgacuuucccucccacaaacccucgcgcccuuccuuuccuacuugggcccggcagaaagcuuaccaugucccgacgcaaccccugcaaauucgaaauccgaggccacugccucaacggcaaacgcugccacuucucccacaacuacuucgaauggcccccccacgcccuccucguacgccaaaacuucaugcucaaccgaauccucaagucaauggacaaauccaucgacacccucuccgaaaucuccggcgccgccgaacucgaccgcaccgaagaauacgcccucggcgucgucggcguccucgaauccuacaucggcuccaucaacaacaucaccaaacaauccgccugcgucgccauguccaaacuccucaccgaacucaacuccgacgacaucaaaaaacuccgcgacaacgaagaacccaacucccccaaaauccgcgucuacaacaccguuaucuccuacaucgaauccaaccgaaaaaacaacaaacaaaccauccaccuccucaaacgacuccccgccgacguccucaaaaaaaccaucaaaaauacccuagacauccacaaauccaucaccaucaacaaccccaaagaauccaccgucaacgacaccaacgaccacgccaaaaacaacgacaccaccuaaggacuaguggaagcauuuuccuggcugauuaaaagaaauuacucagcuauggucaucuguuccuguuagaaggcuaugcagcauauuauauacuaugcgcauguuaugaaaugcauaauaaaaaauuuuaaaaaaucuaaaagaucuaaaaaaaaaaaaaaaaaaaaaaaaaaaaaaaaaaaaaaaaaaaaaaaaaaaaaaaaaaaaaaaaugcaucccccccccccccccccccccccccccccccaaaggcucuuuucagagccaccagaauu

SEQ ID NO: 21272 - RNA, 1022 nt, Artificial Sequence
  mRNA product Design h-4 comprising derived and/or modified sequence from HRSV(Memphis-37)__AIY60641.1__M2-1 (wt)
gggagagggcgcuuggcuugcaaggacccugagcugcggcauugaagcacacccaacccaacucgacugaagucagccucacugaaccggaucugagaaucuucucucucugggcuugccagggcucuccgaaccuagcuagcauccucuucaauuccaacuagaaagcuuaccaugucacgaaggaauccuugcaaauuugaaauucgaggucauugcuugaaugguaagaggugucauuuuagucauaauuauuuugaauggccaccccaugcacugcuuguaagacaaaacuuuauguuaaacagaauacuuaagucuauggauaaaagcauagauacuuuaucagaaauaaguggagcugcagaguuggacagaacugaagaguaugcccucgguguaguuggagugcuagagaguuauauaggaucaauaaauaauauaacuaaacaaucagcauguguugccaugagcaaacuccucacugaacucaacagugaugacaucaaaaaacuaagagauaaugaagagccaaauucaccuaagauaagaguguacaauacugucauaucauauauugaaagcaacaggaaaaacaauaaacaaacuauccaucuguuaaaaagauugccagcagacguauugaagaaaaccaucaaaaacacauuggauauccacaagagcauaaccaucaacaacccaaaagaaucaacuguuaaugauacaaaugaccaugccaaaaauaaugauacuaccugaggacuaguaauaaggaaacuguaugaaugucugugggcaggaagugaagagauccuucuguaaagguuuuuggaauuaugucugcugaauaauaaacuuuuuugaaauaauaaaucugguagaaaaaugagaucuaaaaaaaaaaaaaaaaaaaaaaaaaaaaaaaaaaaaaaaaaaaaaaaaaaaaaaaaaaaaaaaaugcaucccccccccccccccccccccccccccccccaaaggcucuuuucagagccaccagaauu

SEQ ID NO: 21273 - RNA, 1022 nt, Artificial Sequence
  mRNA product Design h-4 comprising derived and/or modified sequence from HRSV(Memphis-37)__AIY60641.1__M2-1 (opt1)
gggagagggcgcuuggcuugcaaggacccugagcugcggcauugaagcacacccaacccaacucgacugaagucagccucacugaaccggaucugagaaucuucucucucugggcuugccagggcucuccgaaccuagcuagcauccucuucaauuccaacuagaaagcuuaccaugagccgccggaaccccugcaaguucgagauccgcggccacugccugaacgggaagcggugccacuucucccacaacuacuucgaguggccgccccacgcccuccuggugcgccagaacuucaugcugaaccggauccucaagagcauggacaaguccaucgacacccugagcgagaucuccggcgccgcggagcuggaccgcaccgaggaguacgcccucggggucgugggcgugcuggagagcuacaucggguccaucaacaacaucacgaagcagagcgccugcgucgccauguccaagcugcucaccgagcugaacagcgacgacaucaagaagcugcgggacaacgaggagcccaacucccccaagauccgcguguacaacaccgugaucagcuacaucgaguccaaccggaagaacaacaagcagaccauccaccuccugaagcgccugccggccgacguccucaagaagacgaucaagaacacccuggacauccacaagagcaucaccaucaacaaccccaaggaguccaccgugaacgacacgaacgaccacgcgaagaacaacgacaccaccugaggacuaguaauaaggaaacuguaugaaugucugugggcaggaagugaagagauccuucuguaaagguuuuuggaauuaugucugcugaauaauaaacuuuuuugaaauaauaaaucugguagaaaaaugagaucuaaaaaaaaaaaaaaaaaaaaaaaaaaaaaaaaaaaaaaaaaaaaaaaaaaaaaaaaaaaaaaaaugcaucccccccccccccccccccccccccccccccaaaggcucuuuucagagccaccagaauu

SEQ ID NO: 21274 - RNA, 1022 nt, Artificial Sequence
  mRNA product Design h-4 comprising derived and/or modified sequence from HRSV(Memphis-37)__AIY60641.1__M2-1 (opt2)
gggagagggcgcuuggcuugcaaggacccugagcugcggcauugaagcacacccaacccaacucgacugaagucagccucacugaaccggaucugagaaucuucucucucugggcuugccagggcucuccgaaccuagcuagcauccucuucaauuccaacuagaaagcuuaccaugucccgccgcaaccccugcaaguucgagauccgcggccacugccucaacggcaagcgcugccacuucucccacaacuacuucgaguggcccccccacgcccuccucguccgccagaacuucaugcucaaccgcauccucaaguccauggacaaguccaucgacacccucuccgagaucuccggcgccgccgagcucgaccgcaccgaggaguacgcccucggcgucgucggcguccucgaguccuacaucggcuccaucaacaacaucaccaagcaguccgccugcgucgccauguccaagcuccucaccgagcucaacuccgacgacaucaagaagcuccgcgacaacgaggagcccaacucccccaagauccgcgucuacaacaccgucaucuccuacaucgaguccaaccgcaagaacaacaagcagaccauccaccuccucaagcgccuccccgccgacguccucaagaagaccaucaagaacacccucgacauccacaaguccaucaccaucaacaaccccaaggaguccaccgucaacgacaccaacgaccacgccaagaacaacgacaccaccugaggacuaguaauaaggaaacuguaugaaugucugugggcaggaagugaagagauccuucuguaaagguuuuuggaauuaugucugcugaauaauaaacuuuuuugaaauaauaaaucugguagaaaaaugagaucuaaaaaaaaaaaaaaaaaaaaaaaaaaaaaaaaaaaaaaaaaaaaaaaaaaaaaaaaaaaaaaaaugcaucccccccccccccccccccccccccccccccaaaggcucuuuucagagccaccagaauu

SEQ ID NO: 21275 - RNA, 1022 nt, Artificial Sequence
  mRNA product Design h-4 comprising derived and/or modified sequence from HRSV(Memphis-37)__AIY60641.1__M2-1 (opt3)
gggagagggcgcuuggcuugcaaggacccugagcugcggcauugaagcacacccaacccaacucgacugaagucagccucacugaaccggaucugagaaucuucucucucugggcuugccagggcucuccgaaccuagcuagcauccucuucaauuccaacuagaaagcuuaccaugagcagaaggaaccccugcaaguucgagauccggggccacugucugaaugggaaacgcugccauuuuucccacaacuacuucgaauggccuccacaugcacuccuugugcgacagaauuuuaugcugaaccguauuuugaagucuauggacaaaucaauagauaccuuaagugagaucagcggagcugcagaacuggacagaacagaggaauaugcccuaggugucguuggcgugcucgaguccuacauugggucuaucaauaacauuacuaagcaaucggcguguguagcuaugucaaaacugcuuacggagcugaauagcgaugacaucaagaaguugagggauaacgaggaaccgaauagucccaaaauacggguguauaacaccgucaucuccuacauugaaucuaaucgcaagaacaauaaacagacaauccaccuccugaagagacugccugccgacgugcucaaaaagacuauuaagaacaccuuagauauccauaaaagcauaacaauuaauaacccaaaggaguccaccguuaacgacacuaaugaucacgccaaaaacaaugacacaaccugaggacuaguaauaaggaaacuguaugaaugucugugggcaggaagugaagagauccuucuguaaagguuuuuggaauuaugucugcugaauaauaaacuuuuuugaaauaauaaaucugguagaaaaaugagaucuaaaaaaaaaaaaaaaaaaaaaaaaaaaaaaaaaaaaaaaaaaaaaaaaaaaaaaaaaaaaaaaaugcaucccccccccccccccccccccccccccccccaaaggcucuuuucagagccaccagaauu

SEQ ID NO: 21276 - RNA, 1022 nt, Artificial Sequence
  mRNA product Design h-4 comprising derived and/or modified sequence from HRSV(Memphis-37)__AIY60641.1__M2-1 (opt4)
gggagagggcgcuuggcuugcaaggacccugagcugcggcauugaagcacacccaacccaacucgacugaagucagccucacugaaccggaucugagaaucuucucucucugggcuugccagggcucuccgaaccuagcuagcauccucuucaauuccaacuagaaagcuuaccaugagcagaagaaaccccugcaaguucgagaucagaggccacugccugaacggcaagagaugccacuucagccacaacuacuucgaguggcccccccacgcccugcuggugagacagaacuucaugcugaacagaauccugaagagcauggacaagagcaucgacacccugagcgagaucagcggcgccgccgagcuggacagaaccgaggaguacgcccugggcguggugggcgugcuggagagcuacaucggcagcaucaacaacaucaccaagcagagcgccugcguggccaugagcaagcugcugaccgagcugaacagcgacgacaucaagaagcugagagacaacgaggagcccaacagccccaagaucagaguguacaacaccgugaucagcuacaucgagagcaacagaaagaacaacaagcagaccauccaccugcugaagagacugcccgccgacgugcugaagaagaccaucaagaacacccuggacauccacaagagcaucaccaucaacaaccccaaggagagcaccgugaacgacaccaacgaccacgccaagaacaacgacaccaccugaggacuaguaauaaggaaacuguaugaaugucugugggcaggaagugaagagauccuucuguaaagguuuuuggaauuaugucugcugaauaauaaacuuuuuugaaauaauaaaucugguagaaaaaugagaucuaaaaaaaaaaaaaaaaaaaaaaaaaaaaaaaaaaaaaaaaaaaaaaaaaaaaaaaaaaaaaaaaugcaucccccccccccccccccccccccccccccccaaaggcucuuuucagagccaccagaauu

SEQ ID NO: 21277 - RNA, 1022 nt, Artificial Sequence
  mRNA product Design h-4 comprising derived and/or modified sequence from HRSV(Memphis-37)__AIY60641.1__M2-1 (opt5)
gggagagggcgcuuggcuugcaaggacccugagcugcggcauugaagcacacccaacccaacucgacugaagucagccucacugaaccggaucugagaaucuucucucucugggcuugccagggcucuccgaaccuagcuagcauccucuucaauuccaacuagaaagcuuaccaugagcagacggaaccccugcaaguucgagauccgcggccacugucugaaugggaaaagaugccauuuuucccacaacuacuucgaauggccuccgcaugcccuccuggugcggcagaauuuuaugcuuaaccgcauucugaagucuauggacaaaagcaucgauacccucuccgagauuucuggagcugccgaacuggacagaacagaggaauaugcgcuuggcgucguuggggugcuggagagcuacaucggauccauuaauaacaucacgaagcaaucugcuuguguggccaugagcaaacuccugaccgagcucaauuccgaugacaucaagaagcugcgggauaacgaggaacccaauagcccuaaaauucgcgucuauaacacagugaucucuuacauugaauccaauagaaagaacaauaaacagaccauccaucugcuuaagcggcugcccgccgacguucucaaaaagacaauuaagaacacccuggauauccacaaaagcauuacaaucaauaacccuaaggagucuaccgugaacgacacgaaugaucacgcuaaaaacaaugacaccacaugaggacuaguaauaaggaaacuguaugaaugucugugggcaggaagugaagagauccuucuguaaagguuuuuggaauuaugucugcugaauaauaaacuuuuuugaaauaauaaaucugguagaaaaaugagaucuaaaaaaaaaaaaaaaaaaaaaaaaaaaaaaaaaaaaaaaaaaaaaaaaaaaaaaaaaaaaaaaaugcaucccccccccccccccccccccccccccccccaaaggcucuuuucagagccaccagaauu

SEQ ID NO: 21278 - RNA, 1022 nt, Artificial Sequence
  mRNA product Design h-4 comprising derived and/or modified sequence from HRSV(Memphis-37)__AIY60641.1__M2-1 (opt6)
gggagagggcgcuuggcuugcaaggacccugagcugcggcauugaagcacacccaacccaacucgacugaagucagccucacugaaccggaucugagaaucuucucucucugggcuugccagggcucuccgaaccuagcuagcauccucuucaauuccaacuagaaagcuuaccauguccagacgaaacccaugcaaauucgaaauaagaggacacugccuaaacggaaaaagaugccacuucucacacaacuacuucgaauggccaccacacgcacuccucguaagacaaaacuucaugcuaaacagaauacuaaaaucaauggacaaaucaauagacacacucucagaaauaucaggagcagcagaacuagaccgaacagaagaauacgcacuaggaguaguaggaguacuagaauccuacauaggaucaauaaacaacauaacaaaacaaucagcaugcguagcaaugucaaaacuacuaacagaauuaaacucagacgacauaaaaaaacuaagagacaacgaagaaccaaacucaccaaaaauaagaguauacaacaccguaauaucauacauagaaucaaacagaaaaaacaacaaacaaacaauacaccuacuaaaaagacuaccagcagacguccuaaaaaaaacaauaaaaaacacacucgacauacacaaaucaauaaccauaaacaacccaaaagaaucaacaguaaacgacaccaacgaccacgcaaaaaacaaugacacaacauaaggacuaguaauaaggaaacuguaugaaugucugugggcaggaagugaagagauccuucuguaaagguuuuuggaauuaugucugcugaauaauaaacuuuuuugaaauaauaaaucugguagaaaaaugagaucuaaaaaaaaaaaaaaaaaaaaaaaaaaaaaaaaaaaaaaaaaaaaaaaaaaaaaaaaaaaaaaaaugcaucccccccccccccccccccccccccccccccaaaggcucuuuucagagccaccagaauu

SEQ ID NO: 21279 - RNA, 1022 nt, Artificial Sequence
  mRNA product Design h-4 comprising derived and/or modified sequence from HRSV(Memphis-37)__AIY60641.1__M2-1 (opt11)
gggagagggcgcuuggcuugcaaggacccugagcugcggcauugaagcacacccaacccaacucgacugaagucagccucacugaaccggaucugagaaucuucucucucugggcuugccagggcucuccgaaccuagcuagcauccucuucaauuccaacuagaaagcuuaccaugucccgacgcaaccccugcaaauucgaaauccgaggccacugccucaacggcaaacgcugccacuucucccacaacuacuucgaauggcccccccacgcccuccucguacgccaaaacuucaugcucaaccgaauccucaagucaauggacaaauccaucgacacccucuccgaaaucuccggcgccgccgaacucgaccgcaccgaagaauacgcccucggcgucgucggcguccucgaauccuacaucggcuccaucaacaacaucaccaaacaauccgccugcgucgccauguccaaacuccucaccgaacucaacuccgacgacaucaaaaaacuccgcgacaacgaagaacccaacucccccaaaauccgcgucuacaacaccguuaucuccuacaucgaauccaaccgaaaaaacaacaaacaaaccauccaccuccucaaacgacuccccgccgacguccucaaaaaaaccaucaaaaauacccuagacauccacaaauccaucaccaucaacaaccccaaagaauccaccgucaacgacaccaacgaccacgccaaaaacaacgacaccaccuaaggacuaguaauaaggaaacuguaugaaugucugugggcaggaagugaagagauccuucuguaaagguuuuuggaauuaugucugcugaauaauaaacuuuuuugaaauaauaaaucugguagaaaaaugagaucuaaaaaaaaaaaaaaaaaaaaaaaaaaaaaaaaaaaaaaaaaaaaaaaaaaaaaaaaaaaaaaaaugcaucccccccccccccccccccccccccccccccaaaggcucuuuucagagccaccagaauu

SEQ ID NO: 21280 - RNA, 1038 nt, Artificial Sequence
  mRNA product Design h-5 comprising derived and/or modified sequence from HRSV(Memphis-37)__AIY60641.1__M2-1 (wt)
gggagagggcgcuuggcuugcaaggacccugagcugcggcauugaagcacacccaacccaacucgacugaagucagccucacugaaccggaucugagaaucuucucucucugggcuugccagggcucuccgaaccuagcuagcauccucuucaauuccaacuagaaagcuuaccaugucacgaaggaauccuugcaaauuugaaauucgaggucauugcuugaaugguaagaggugucauuuuagucauaauuauuuugaauggccaccccaugcacugcuuguaagacaaaacuuuauguuaaacagaauacuuaagucuauggauaaaagcauagauacuuuaucagaaauaaguggagcugcagaguuggacagaacugaagaguaugcccucgguguaguuggagugcuagagaguuauauaggaucaauaaauaauauaacuaaacaaucagcauguguugccaugagcaaacuccucacugaacucaacagugaugacaucaaaaaacuaagagauaaugaagagccaaauucaccuaagauaagaguguacaauacugucauaucauauauugaaagcaacaggaaaaacaauaaacaaacuauccaucuguuaaaaagauugccagcagacguauugaagaaaaccaucaaaaacacauuggauauccacaagagcauaaccaucaacaacccaaaagaaucaacuguuaaugauacaaaugaccaugccaaaaauaaugauacuaccugaggacuaguacuggcugcaucucccuuuccucuguccuccauccuucucccaggauggugaagggggaccugguacccagugauccccaccccaggauccuaaaucaugacuuaccugcuaauaaaaacucauuggaaaagugagaagaucuaaaaaaaaaaaaaaaaaaaaaaaaaaaaaaaaaaaaaaaaaaaaaaaaaaaaaaaaaaaaaaaaugcaucccccccccccccccccccccccccccccccaaaggcucuuuucagagccaccagaauu

SEQ ID NO: 21281 - RNA, 1038 nt, Artificial Sequence
  mRNA product Design h-5 comprising derived and/or modified sequence from HRSV(Memphis-37)__AIY60641.1__M2-1 (opt1)
gggagagggcgcuuggcuugcaaggacccugagcugcggcauugaagcacacccaacccaacucgacugaagucagccucacugaaccggaucugagaaucuucucucucugggcuugccagggcucuccgaaccuagcuagcauccucuucaauuccaacuagaaagcuuaccaugagccgccggaaccccugcaaguucgagauccgcggccacugccugaacgggaagcggugccacuucucccacaacuacuucgaguggccgccccacgcccuccuggugcgccagaacuucaugcugaaccggauccucaagagcauggacaaguccaucgacacccugagcgagaucuccggcgccgcggagcuggaccgcaccgaggaguacgcccucggggucgugggcgugcuggagagcuacaucggguccaucaacaacaucacgaagcagagcgccugcgucgccauguccaagcugcucaccgagcugaacagcgacgacaucaagaagcugcgggacaacgaggagcccaacucccccaagauccgcguguacaacaccgugaucagcuacaucgaguccaaccggaagaacaacaagcagaccauccaccuccugaagcgccugccggccgacguccucaagaagacgaucaagaacacccuggacauccacaagagcaucaccaucaacaaccccaaggaguccaccgugaacgacacgaacgaccacgcgaagaacaacgacaccaccugaggacuaguacuggcugcaucucccuuuccucuguccuccauccuucucccaggauggugaagggggaccugguacccagugauccccaccccaggauccuaaaucaugacuuaccugcuaauaaaaacucauuggaaaagugagaagaucuaaaaaaaaaaaaaaaaaaaaaaaaaaaaaaaaaaaaaaaaaaaaaaaaaaaaaaaaaaaaaaaaugcaucccccccccccccccccccccccccccccccaaaggcucuuuucagagccaccagaauu

SEQ ID NO: 21282 - RNA, 1038 nt, Artificial Sequence
  mRNA product Design h-5 comprising derived and/or modified sequence from HRSV(Memphis-37)__AIY60641.1__M2-1 (opt2)
gggagagggcgcuuggcuugcaaggacccugagcugcggcauugaagcacacccaacccaacucgacugaagucagccucacugaaccggaucugagaaucuucucucucugggcuugccagggcucuccgaaccuagcuagcauccucuucaauuccaacuagaaagcuuaccaugucccgccgcaaccccugcaaguucgagauccgcggccacugccucaacggcaagcgcugccacuucucccacaacuacuucgaguggcccccccacgcccuccucguccgccagaacuucaugcucaaccgcauccucaaguccauggacaaguccaucgacacccucuccgagaucuccggcgccgccgagcucgaccgcaccgaggaguacgcccucggcgucgucggcguccucgaguccuacaucggcuccaucaacaacaucaccaagcaguccgccugcgucgccauguccaagcuccucaccgagcucaacuccgacgacaucaagaagcuccgcgacaacgaggagcccaacucccccaagauccgcgucuacaacaccgucaucuccuacaucgaguccaaccgcaagaacaacaagcagaccauccaccuccucaagcgccuccccgccgacguccucaagaagaccaucaagaacacccucgacauccacaaguccaucaccaucaacaaccccaaggaguccaccgucaacgacaccaacgaccacgccaagaacaacgacaccaccugaggacuaguacuggcugcaucucccuuuccucuguccuccauccuucucccaggauggugaagggggaccugguacccagugauccccaccccaggauccuaaaucaugacuuaccugcuaauaaaaacucauuggaaaagugagaagaucuaaaaaaaaaaaaaaaaaaaaaaaaaaaaaaaaaaaaaaaaaaaaaaaaaaaaaaaaaaaaaaaaugcaucccccccccccccccccccccccccccccccaaaggcucuuuucagagccaccagaauu

SEQ ID NO: 21283 - RNA, 1038 nt, Artificial Sequence
  mRNA product Design h-5 comprising derived and/or modified sequence from HRSV(Memphis-37)__AIY60641.1__M2-1 (opt3)
gggagagggcgcuuggcuugcaaggacccugagcugcggcauugaagcacacccaacccaacucgacugaagucagccucacugaaccggaucugagaaucuucucucucugggcuugccagggcucuccgaaccuagcuagcauccucuucaauuccaacuagaaagcuuaccaugagcagaaggaaccccugcaaguucgagauccggggccacugucugaaugggaaacgcugccauuuuucccacaacuacuucgaauggccuccacaugcacuccuugugcgacagaauuuuaugcugaaccguauuuugaagucuauggacaaaucaauagauaccuuaagugagaucagcggagcugcagaacuggacagaacagaggaauaugcccuaggugucguuggcgugcucgaguccuacauugggucuaucaauaacauuacuaagcaaucggcguguguagcuaugucaaaacugcuuacggagcugaauagcgaugacaucaagaaguugagggauaacgaggaaccgaauagucccaaaauacggguguauaacaccgucaucuccuacauugaaucuaaucgcaagaacaauaaacagacaauccaccuccugaagagacugccugccgacgugcucaaaaagacuauuaagaacaccuuagauauccauaaaagcauaacaauuaauaacccaaaggaguccaccguuaacgacacuaaugaucacgccaaaaacaaugacacaaccugaggacuaguacuggcugcaucucccuuuccucuguccuccauccuucucccaggauggugaagggggaccugguacccagugauccccaccccaggauccuaaaucaugacuuaccugcuaauaaaaacucauuggaaaagugagaagaucuaaaaaaaaaaaaaaaaaaaaaaaaaaaaaaaaaaaaaaaaaaaaaaaaaaaaaaaaaaaaaaaaugcaucccccccccccccccccccccccccccccccaaaggcucuuuucagagccaccagaauu

SEQ ID NO: 21284 - RNA, 1038 nt, Artificial Sequence
  mRNA product Design h-5 comprising derived and/or modified sequence from HRSV(Memphis-37)__AIY60641.1__M2-1 (opt4)
gggagagggcgcuuggcuugcaaggacccugagcugcggcauugaagcacacccaacccaacucgacugaagucagccucacugaaccggaucugagaaucuucucucucugggcuugccagggcucuccgaaccuagcuagcauccucuucaauuccaacuagaaagcuuaccaugagcagaagaaaccccugcaaguucgagaucagaggccacugccugaacggcaagagaugccacuucagccacaacuacuucgaguggcccccccacgcccugcuggugagacagaacuucaugcugaacagaauccugaagagcauggacaagagcaucgacacccugagcgagaucagcggcgccgccgagcuggacagaaccgaggaguacgcccugggcguggugggcgugcuggagagcuacaucggcagcaucaacaacaucaccaagcagagcgccugcguggccaugagcaagcugcugaccgagcugaacagcgacgacaucaagaagcugagagacaacgaggagcccaacagccccaagaucagaguguacaacaccgugaucagcuacaucgagagcaacagaaagaacaacaagcagaccauccaccugcugaagagacugcccgccgacgugcugaagaagaccaucaagaacacccuggacauccacaagagcaucaccaucaacaaccccaaggagagcaccgugaacgacaccaacgaccacgccaagaacaacgacaccaccugaggacuaguacuggcugcaucucccuuuccucuguccuccauccuucucccaggauggugaagggggaccugguacccagugauccccaccccaggauccuaaaucaugacuuaccugcuaauaaaaacucauuggaaaagugagaagaucuaaaaaaaaaaaaaaaaaaaaaaaaaaaaaaaaaaaaaaaaaaaaaaaaaaaaaaaaaaaaaaaaugcaucccccccccccccccccccccccccccccccaaaggcucuuuucagagccaccagaauu

SEQ ID NO: 21285 - RNA, 1038 nt, Artificial Sequence
  mRNA product Design h-5 comprising derived and/or modified sequence from HRSV(Memphis-37)__AIY60641.1__M2-1 (opt5)
gggagagggcgcuuggcuugcaaggacccugagcugcggcauugaagcacacccaacccaacucgacugaagucagccucacugaaccggaucugagaaucuucucucucugggcuugccagggcucuccgaaccuagcuagcauccucuucaauuccaacuagaaagcuuaccaugagcagacggaaccccugcaaguucgagauccgcggccacugucugaaugggaaaagaugccauuuuucccacaacuacuucgaauggccuccgcaugcccuccuggugcggcagaauuuuaugcuuaaccgcauucugaagucuauggacaaaagcaucgauacccucuccgagauuucuggagcugccgaacuggacagaacagaggaauaugcgcuuggcgucguuggggugcuggagagcuacaucggauccauuaauaacaucacgaagcaaucugcuuguguggccaugagcaaacuccugaccgagcucaauuccgaugacaucaagaagcugcgggauaacgaggaacccaauagcccuaaaauucgcgucuauaacacagugaucucuuacauugaauccaauagaaagaacaauaaacagaccauccaucugcuuaagcggcugcccgccgacguucucaaaaagacaauuaagaacacccuggauauccacaaaagcauuacaaucaauaacccuaaggagucuaccgugaacgacacgaaugaucacgcuaaaaacaaugacaccacaugaggacuaguacuggcugcaucucccuuuccucuguccuccauccuucucccaggauggugaagggggaccugguacccagugauccccaccccaggauccuaaaucaugacuuaccugcuaauaaaaacucauuggaaaagugagaagaucuaaaaaaaaaaaaaaaaaaaaaaaaaaaaaaaaaaaaaaaaaaaaaaaaaaaaaaaaaaaaaaaaugcaucccccccccccccccccccccccccccccccaaaggcucuuuucagagccaccagaauu

SEQ ID NO: 21286 - RNA, 1038 nt, Artificial Sequence
  mRNA product Design h-5 comprising derived and/or modified sequence from HRSV(Memphis-37)__AIY60641.1__M2-1 (opt6)
gggagagggcgcuuggcuugcaaggacccugagcugcggcauugaagcacacccaacccaacucgacugaagucagccucacugaaccggaucugagaaucuucucucucugggcuugccagggcucuccgaaccuagcuagcauccucuucaauuccaacuagaaagcuuaccauguccagacgaaacccaugcaaauucgaaauaagaggacacugccuaaacggaaaaagaugccacuucucacacaacuacuucgaauggccaccacacgcacuccucguaagacaaaacuucaugcuaaacagaauacuaaaaucaauggacaaaucaauagacacacucucagaaauaucaggagcagcagaacuagaccgaacagaagaauacgcacuaggaguaguaggaguacuagaauccuacauaggaucaauaaacaacauaacaaaacaaucagcaugcguagcaaugucaaaacuacuaacagaauuaaacucagacgacauaaaaaaacuaagagacaacgaagaaccaaacucaccaaaaauaagaguauacaacaccguaauaucauacauagaaucaaacagaaaaaacaacaaacaaacaauacaccuacuaaaaagacuaccagcagacguccuaaaaaaaacaauaaaaaacacacucgacauacacaaaucaauaaccauaaacaacccaaaagaaucaacaguaaacgacaccaacgaccacgcaaaaaacaaugacacaacauaaggacuaguacuggcugcaucucccuuuccucuguccuccauccuucucccaggauggugaagggggaccugguacccagugauccccaccccaggauccuaaaucaugacuuaccugcuaauaaaaacucauuggaaaagugagaagaucuaaaaaaaaaaaaaaaaaaaaaaaaaaaaaaaaaaaaaaaaaaaaaaaaaaaaaaaaaaaaaaaaugcaucccccccccccccccccccccccccccccccaaaggcucuuuucagagccaccagaauu

SEQ ID NO: 21287 - RNA, 1038 nt, Artificial Sequence
  mRNA product Design h-5 comprising derived and/or modified sequence from HRSV(Memphis-37)__AIY60641.1__M2-1 (opt11)
gggagagggcgcuuggcuugcaaggacccugagcugcggcauugaagcacacccaacccaacucgacugaagucagccucacugaaccggaucugagaaucuucucucucugggcuugccagggcucuccgaaccuagcuagcauccucuucaauuccaacuagaaagcuuaccaugucccgacgcaaccccugcaaauucgaaauccgaggccacugccucaacggcaaacgcugccacuucucccacaacuacuucgaauggcccccccacgcccuccucguacgccaaaacuucaugcucaaccgaauccucaagucaauggacaaauccaucgacacccucuccgaaaucuccggcgccgccgaacucgaccgcaccgaagaauacgcccucggcgucgucggcguccucgaauccuacaucggcuccaucaacaacaucaccaaacaauccgccugcgucgccauguccaaacuccucaccgaacucaacuccgacgacaucaaaaaacuccgcgacaacgaagaacccaacucccccaaaauccgcgucuacaacaccguuaucuccuacaucgaauccaaccgaaaaaacaacaaacaaaccauccaccuccucaaacgacuccccgccgacguccucaaaaaaaccaucaaaaauacccuagacauccacaaauccaucaccaucaacaaccccaaagaauccaccgucaacgacaccaacgaccacgccaaaaacaacgacaccaccuaaggacuaguacuggcugcaucucccuuuccucuguccuccauccuucucccaggauggugaagggggaccugguacccagugauccccaccccaggauccuaaaucaugacuuaccugcuaauaaaaacucauuggaaaagugagaagaucuaaaaaaaaaaaaaaaaaaaaaaaaaaaaaaaaaaaaaaaaaaaaaaaaaaaaaaaaaaaaaaaaugcaucccccccccccccccccccccccccccccccaaaggcucuuuucagagccaccagaauu

SEQ ID NO: 21288 - RNA, 971 nt, Artificial Sequence
  mRNA product Design i-1 comprising derived and/or modified sequence from HRSV(Memphis-37)__AIY60641.1__M2-1 (wt)
gggagagggcgcuuggcuugcaaggacccugagcugcggcauugaagcacacccaacccaacucgacugaagucagccucacugaaccggaucugagaaucuucucucucugggcuugccagggcucuccgaaccuagcuagcauccucuucaauuccaacuagaaagcuuaccaugucacgaaggaauccuugcaaauuugaaauucgaggucauugcuugaaugguaagaggugucauuuuagucauaauuauuuugaauggccaccccaugcacugcuuguaagacaaaacuuuauguuaaacagaauacuuaagucuauggauaaaagcauagauacuuuaucagaaauaaguggagcugcagaguuggacagaacugaagaguaugcccucgguguaguuggagugcuagagaguuauauaggaucaauaaauaauauaacuaaacaaucagcauguguugccaugagcaaacuccucacugaacucaacagugaugacaucaaaaaacuaagagauaaugaagagccaaauucaccuaagauaagaguguacaauacugucauaucauauauugaaagcaacaggaaaaacaauaaacaaacuauccaucuguuaaaaagauugccagcagacguauugaagaaaaccaucaaaaacacauuggauauccacaagagcauaaccaucaacaacccaaaagaaucaacuguuaaugauacaaaugaccaugccaaaaauaaugauacuaccugaggacuaguguccaccugucccuccugggcugcuggauugucucguuuuccugccaaauaaacaggaucagcgcuuuacagaucuaaaaaaaaaaaaaaaaaaaaaaaaaaaaaaaaaaaaaaaaaaaaaaaaaaaaaaaaaaaaaaaaugcaucccccccccccccccccccccccccccccccaaaggcucuuuucagagccaccagaauu

SEQ ID NO: 21289 - RNA, 971 nt, Artificial Sequence
  mRNA product Design i-1 comprising derived and/or modified sequence from HRSV(Memphis-37)__AIY60641.1__M2-1 (opt1)
gggagagggcgcuuggcuugcaaggacccugagcugcggcauugaagcacacccaacccaacucgacugaagucagccucacugaaccggaucugagaaucuucucucucugggcuugccagggcucuccgaaccuagcuagcauccucuucaauuccaacuagaaagcuuaccaugagccgccggaaccccugcaaguucgagauccgcggccacugccugaacgggaagcggugccacuucucccacaacuacuucgaguggccgccccacgcccuccuggugcgccagaacuucaugcugaaccggauccucaagagcauggacaaguccaucgacacccugagcgagaucuccggcgccgcggagcuggaccgcaccgaggaguacgcccucggggucgugggcgugcuggagagcuacaucggguccaucaacaacaucacgaagcagagcgccugcgucgccauguccaagcugcucaccgagcugaacagcgacgacaucaagaagcugcgggacaacgaggagcccaacucccccaagauccgcguguacaacaccgugaucagcuacaucgaguccaaccggaagaacaacaagcagaccauccaccuccugaagcgccugccggccgacguccucaagaagacgaucaagaacacccuggacauccacaagagcaucaccaucaacaaccccaaggaguccaccgugaacgacacgaacgaccacgcgaagaacaacgacaccaccugaggacuaguguccaccugucccuccugggcugcuggauugucucguuuuccugccaaauaaacaggaucagcgcuuuacagaucuaaaaaaaaaaaaaaaaaaaaaaaaaaaaaaaaaaaaaaaaaaaaaaaaaaaaaaaaaaaaaaaaugcaucccccccccccccccccccccccccccccccaaaggcucuuuucagagccaccagaauu

SEQ ID NO: 21290 - RNA, 971 nt, Artificial Sequence
  mRNA product Design i-1 comprising derived and/or modified sequence from HRSV(Memphis-37)__AIY60641.1__M2-1 (opt2)
gggagagggcgcuuggcuugcaaggacccugagcugcggcauugaagcacacccaacccaacucgacugaagucagccucacugaaccggaucugagaaucuucucucucugggcuugccagggcucuccgaaccuagcuagcauccucuucaauuccaacuagaaagcuuaccaugucccgccgcaaccccugcaaguucgagauccgcggccacugccucaacggcaagcgcugccacuucucccacaacuacuucgaguggcccccccacgcccuccucguccgccagaacuucaugcucaaccgcauccucaaguccauggacaaguccaucgacacccucuccgagaucuccggcgccgccgagcucgaccgcaccgaggaguacgcccucggcgucgucggcguccucgaguccuacaucggcuccaucaacaacaucaccaagcaguccgccugcgucgccauguccaagcuccucaccgagcucaacuccgacgacaucaagaagcuccgcgacaacgaggagcccaacucccccaagauccgcgucuacaacaccgucaucuccuacaucgaguccaaccgcaagaacaacaagcagaccauccaccuccucaagcgccuccccgccgacguccucaagaagaccaucaagaacacccucgacauccacaaguccaucaccaucaacaaccccaaggaguccaccgucaacgacaccaacgaccacgccaagaacaacgacaccaccugaggacuaguguccaccugucccuccugggcugcuggauugucucguuuuccugccaaauaaacaggaucagcgcuuuacagaucuaaaaaaaaaaaaaaaaaaaaaaaaaaaaaaaaaaaaaaaaaaaaaaaaaaaaaaaaaaaaaaaaugcaucccccccccccccccccccccccccccccccaaaggcucuuuucagagccaccagaauu

SEQ ID NO: 21291 - RNA, 971 nt, Artificial Sequence
  mRNA product Design i-1 comprising derived and/or modified sequence from HRSV(Memphis-37)__AIY60641.1__M2-1 (opt3)
gggagagggcgcuuggcuugcaaggacccugagcugcggcauugaagcacacccaacccaacucgacugaagucagccucacugaaccggaucugagaaucuucucucucugggcuugccagggcucuccgaaccuagcuagcauccucuucaauuccaacuagaaagcuuaccaugagcagaaggaaccccugcaaguucgagauccggggccacugucugaaugggaaacgcugccauuuuucccacaacuacuucgaauggccuccacaugcacuccuugugcgacagaauuuuaugcugaaccguauuuugaagucuauggacaaaucaauagauaccuuaagugagaucagcggagcugcagaacuggacagaacagaggaauaugcccuaggugucguuggcgugcucgaguccuacauugggucuaucaauaacauuacuaagcaaucggcguguguagcuaugucaaaacugcuuacggagcugaauagcgaugacaucaagaaguugagggauaacgaggaaccgaauagucccaaaauacggguguauaacaccgucaucuccuacauugaaucuaaucgcaagaacaauaaacagacaauccaccuccugaagagacugccugccgacgugcucaaaaagacuauuaagaacaccuuagauauccauaaaagcauaacaauuaauaacccaaaggaguccaccguuaacgacacuaaugaucacgccaaaaacaaugacacaaccugaggacuaguguccaccugucccuccugggcugcuggauugucucguuuuccugccaaauaaacaggaucagcgcuuuacagaucuaaaaaaaaaaaaaaaaaaaaaaaaaaaaaaaaaaaaaaaaaaaaaaaaaaaaaaaaaaaaaaaaugcaucccccccccccccccccccccccccccccccaaaggcucuuuucagagccaccagaauu

SEQ ID NO: 21292 - RNA, 971 nt, Artificial Sequence
  mRNA product Design i-1 comprising derived and/or modified sequence from HRSV(Memphis-37)__AIY60641.1__M2-1 (opt4)
gggagagggcgcuuggcuugcaaggacccugagcugcggcauugaagcacacccaacccaacucgacugaagucagccucacugaaccggaucugagaaucuucucucucugggcuugccagggcucuccgaaccuagcuagcauccucuucaauuccaacuagaaagcuuaccaugagcagaagaaaccccugcaaguucgagaucagaggccacugccugaacggcaagagaugccacuucagccacaacuacuucgaguggcccccccacgcccugcuggugagacagaacuucaugcugaacagaauccugaagagcauggacaagagcaucgacacccugagcgagaucagcggcgccgccgagcuggacagaaccgaggaguacgcccugggcguggugggcgugcuggagagcuacaucggcagcaucaacaacaucaccaagcagagcgccugcguggccaugagcaagcugcugaccgagcugaacagcgacgacaucaagaagcugagagacaacgaggagcccaacagccccaagaucagaguguacaacaccgugaucagcuacaucgagagcaacagaaagaacaacaagcagaccauccaccugcugaagagacugcccgccgacgugcugaagaagaccaucaagaacacccuggacauccacaagagcaucaccaucaacaaccccaaggagagcaccgugaacgacaccaacgaccacgccaagaacaacgacaccaccugaggacuaguguccaccugucccuccugggcugcuggauugucucguuuuccugccaaauaaacaggaucagcgcuuuacagaucuaaaaaaaaaaaaaaaaaaaaaaaaaaaaaaaaaaaaaaaaaaaaaaaaaaaaaaaaaaaaaaaaugcaucccccccccccccccccccccccccccccccaaaggcucuuuucagagccaccagaauu

SEQ ID NO: 21293 - RNA, 971 nt, Artificial Sequence
  mRNA product Design i-1 comprising derived and/or modified sequence from HRSV(Memphis-37)__AIY60641.1__M2-1 (opt5)
gggagagggcgcuuggcuugcaaggacccugagcugcggcauugaagcacacccaacccaacucgacugaagucagccucacugaaccggaucugagaaucuucucucucugggcuugccagggcucuccgaaccuagcuagcauccucuucaauuccaacuagaaagcuuaccaugagcagacggaaccccugcaaguucgagauccgcggccacugucugaaugggaaaagaugccauuuuucccacaacuacuucgaauggccuccgcaugcccuccuggugcggcagaauuuuaugcuuaaccgcauucugaagucuauggacaaaagcaucgauacccucuccgagauuucuggagcugccgaacuggacagaacagaggaauaugcgcuuggcgucguuggggugcuggagagcuacaucggauccauuaauaacaucacgaagcaaucugcuuguguggccaugagcaaacuccugaccgagcucaauuccgaugacaucaagaagcugcgggauaacgaggaacccaauagcccuaaaauucgcgucuauaacacagugaucucuuacauugaauccaauagaaagaacaauaaacagaccauccaucugcuuaagcggcugcccgccgacguucucaaaaagacaauuaagaacacccuggauauccacaaaagcauuacaaucaauaacccuaaggagucuaccgugaacgacacgaaugaucacgcuaaaaacaaugacaccacaugaggacuaguguccaccugucccuccugggcugcuggauugucucguuuuccugccaaauaaacaggaucagcgcuuuacagaucuaaaaaaaaaaaaaaaaaaaaaaaaaaaaaaaaaaaaaaaaaaaaaaaaaaaaaaaaaaaaaaaaugcaucccccccccccccccccccccccccccccccaaaggcucuuuucagagccaccagaauu

SEQ ID NO: 21294 - RNA, 971 nt, Artificial Sequence
  mRNA product Design i-1 comprising derived and/or modified sequence from HRSV(Memphis-37)__AIY60641.1__M2-1 (opt6)
gggagagggcgcuuggcuugcaaggacccugagcugcggcauugaagcacacccaacccaacucgacugaagucagccucacugaaccggaucugagaaucuucucucucugggcuugccagggcucuccgaaccuagcuagcauccucuucaauuccaacuagaaagcuuaccauguccagacgaaacccaugcaaauucgaaauaagaggacacugccuaaacggaaaaagaugccacuucucacacaacuacuucgaauggccaccacacgcacuccucguaagacaaaacuucaugcuaaacagaauacuaaaaucaauggacaaaucaauagacacacucucagaaauaucaggagcagcagaacuagaccgaacagaagaauacgcacuaggaguaguaggaguacuagaauccuacauaggaucaauaaacaacauaacaaaacaaucagcaugcguagcaaugucaaaacuacuaacagaauuaaacucagacgacauaaaaaaacuaagagacaacgaagaaccaaacucaccaaaaauaagaguauacaacaccguaauaucauacauagaaucaaacagaaaaaacaacaaacaaacaauacaccuacuaaaaagacuaccagcagacguccuaaaaaaaacaauaaaaaacacacucgacauacacaaaucaauaaccauaaacaacccaaaagaaucaacaguaaacgacaccaacgaccacgcaaaaaacaaugacacaacauaaggacuaguguccaccugucccuccugggcugcuggauugucucguuuuccugccaaauaaacaggaucagcgcuuuacagaucuaaaaaaaaaaaaaaaaaaaaaaaaaaaaaaaaaaaaaaaaaaaaaaaaaaaaaaaaaaaaaaaaugcaucccccccccccccccccccccccccccccccaaaggcucuuuucagagccaccagaauu

SEQ ID NO: 21295 - RNA, 971 nt, Artificial Sequence
  mRNA product Design i-1 comprising derived and/or modified sequence from HRSV(Memphis-37)__AIY60641.1__M2-1 (opt11)
gggagagggcgcuuggcuugcaaggacccugagcugcggcauugaagcacacccaacccaacucgacugaagucagccucacugaaccggaucugagaaucuucucucucugggcuugccagggcucuccgaaccuagcuagcauccucuucaauuccaacuagaaagcuuaccaugucccgacgcaaccccugcaaauucgaaauccgaggccacugccucaacggcaaacgcugccacuucucccacaacuacuucgaauggcccccccacgcccuccucguacgccaaaacuucaugcucaaccgaauccucaagucaauggacaaauccaucgacacccucuccgaaaucuccggcgccgccgaacucgaccgcaccgaagaauacgcccucggcgucgucggcguccucgaauccuacaucggcuccaucaacaacaucaccaaacaauccgccugcgucgccauguccaaacuccucaccgaacucaacuccgacgacaucaaaaaacuccgcgacaacgaagaacccaacucccccaaaauccgcgucuacaacaccguuaucuccuacaucgaauccaaccgaaaaaacaacaaacaaaccauccaccuccucaaacgacuccccgccgacguccucaaaaaaaccaucaaaaauacccuagacauccacaaauccaucaccaucaacaaccccaaagaauccaccgucaacgacaccaacgaccacgccaaaaacaacgacaccaccuaaggacuaguguccaccugucccuccugggcugcuggauugucucguuuuccugccaaauaaacaggaucagcgcuuuacagaucuaaaaaaaaaaaaaaaaaaaaaaaaaaaaaaaaaaaaaaaaaaaaaaaaaaaaaaaaaaaaaaaaugcaucccccccccccccccccccccccccccccccaaaggcucuuuucagagccaccagaauu

SEQ ID NO: 21296 - RNA, 971 nt, Artificial Sequence
  mRNA product Design i-2 comprising derived and/or modified sequence from HRSV(Memphis-37)__AIY60641.1__M2-1 (wt)
gggagaggcgcugccuacggagguggcagccaucuccuucucggcaucaagcuuaccaugucacgaaggaauccuugcaaauuugaaauucgaggucauugcuugaaugguaagaggugucauuuuagucauaauuauuuugaauggccaccccaugcacugcuuguaagacaaaacuuuauguuaaacagaauacuuaagucuauggauaaaagcauagauacuuuaucagaaauaaguggagcugcagaguuggacagaacugaagaguaugcccucgguguaguuggagugcuagagaguuauauaggaucaauaaauaauauaacuaaacaaucagcauguguugccaugagcaaacuccucacugaacucaacagugaugacaucaaaaaacuaagagauaaugaagagccaaauucaccuaagauaagaguguacaauacugucauaucauauauugaaagcaacaggaaaaacaauaaacaaacuauccaucuguuaaaaagauugccagcagacguauugaagaaaaccaucaaaaacacauuggauauccacaagagcauaaccaucaacaacccaaaagaaucaacuguuaaugauacaaaugaccaugccaaaaauaaugauacuaccugaggacuagugcaucacauuuaaaagcaucucagccuaccaugagaauaagagaaagaaaaugaagaucaauagcuuauucaucucuuuuucuuuuucguugguguaaagccaacacccugucuaaaaaacauaaauuucuuuaaucauuuugccucuuuucucugugcuucaauuaauaaaaaauggaaagaaccuagaucuaaaaaaaaaaaaaaaaaaaaaaaaaaaaaaaaaaaaaaaaaaaaaaaaaaaaaaaaaaaaaaaaugcaucccccccccccccccccccccccccccccccaaaggcucuuuucagagccaccagaauu

SEQ ID NO: 21297 - RNA, 971 nt, Artificial Sequence
  mRNA product Design i-2 comprising derived and/or modified sequence from HRSV(Memphis-37)__AIY60641.1__M2-1 (opt1)
gggagaggcgcugccuacggagguggcagccaucuccuucucggcaucaagcuuaccaugagccgccggaaccccugcaaguucgagauccgcggccacugccugaacgggaagcggugccacuucucccacaacuacuucgaguggccgccccacgcccuccuggugcgccagaacuucaugcugaaccggauccucaagagcauggacaaguccaucgacacccugagcgagaucuccggcgccgcggagcuggaccgcaccgaggaguacgcccucggggucgugggcgugcuggagagcuacaucggguccaucaacaacaucacgaagcagagcgccugcgucgccauguccaagcugcucaccgagcugaacagcgacgacaucaagaagcugcgggacaacgaggagcccaacucccccaagauccgcguguacaacaccgugaucagcuacaucgaguccaaccggaagaacaacaagcagaccauccaccuccugaagcgccugccggccgacguccucaagaagacgaucaagaacacccuggacauccacaagagcaucaccaucaacaaccccaaggaguccaccgugaacgacacgaacgaccacgcgaagaacaacgacaccaccugaggacuagugcaucacauuuaaaagcaucucagccuaccaugagaauaagagaaagaaaaugaagaucaauagcuuauucaucucuuuuucuuuuucguugguguaaagccaacacccugucuaaaaaacauaaauuucuuuaaucauuuugccucuuuucucugugcuucaauuaauaaaaaauggaaagaaccuagaucuaaaaaaaaaaaaaaaaaaaaaaaaaaaaaaaaaaaaaaaaaaaaaaaaaaaaaaaaaaaaaaaaugcaucccccccccccccccccccccccccccccccaaaggcucuuuucagagccaccagaauu

SEQ ID NO: 21298 - RNA, 971 nt, Artificial Sequence
  mRNA product Design i-2 comprising derived and/or modified sequence from HRSV(Memphis-37)__AIY60641.1__M2-1 (opt2)
gggagaggcgcugccuacggagguggcagccaucuccuucucggcaucaagcuuaccaugucccgccgcaaccccugcaaguucgagauccgcggccacugccucaacggcaagcgcugccacuucucccacaacuacuucgaguggcccccccacgcccuccucguccgccagaacuucaugcucaaccgcauccucaaguccauggacaaguccaucgacacccucuccgagaucuccggcgccgccgagcucgaccgcaccgaggaguacgcccucggcgucgucggcguccucgaguccuacaucggcuccaucaacaacaucaccaagcaguccgccugcgucgccauguccaagcuccucaccgagcucaacuccgacgacaucaagaagcuccgcgacaacgaggagcccaacucccccaagauccgcgucuacaacaccgucaucuccuacaucgaguccaaccgcaagaacaacaagcagaccauccaccuccucaagcgccuccccgccgacguccucaagaagaccaucaagaacacccucgacauccacaaguccaucaccaucaacaaccccaaggaguccaccgucaacgacaccaacgaccacgccaagaacaacgacaccaccugaggacuagugcaucacauuuaaaagcaucucagccuaccaugagaauaagagaaagaaaaugaagaucaauagcuuauucaucucuuuuucuuuuucguugguguaaagccaacacccugucuaaaaaacauaaauuucuuuaaucauuuugccucuuuucucugugcuucaauuaauaaaaaauggaaagaaccuagaucuaaaaaaaaaaaaaaaaaaaaaaaaaaaaaaaaaaaaaaaaaaaaaaaaaaaaaaaaaaaaaaaaugcaucccccccccccccccccccccccccccccccaaaggcucuuuucagagccaccagaauu

SEQ ID NO: 21299 - RNA, 971 nt, Artificial Sequence
  mRNA product Design i-2 comprising derived and/or modified sequence from HRSV(Memphis-37)__AIY60641.1__M2-1 (opt3)
gggagaggcgcugccuacggagguggcagccaucuccuucucggcaucaagcuuaccaugagcagaaggaaccccugcaaguucgagauccggggccacugucugaaugggaaacgcugccauuuuucccacaacuacuucgaauggccuccacaugcacuccuugugcgacagaauuuuaugcugaaccguauuuugaagucuauggacaaaucaauagauaccuuaagugagaucagcggagcugcagaacuggacagaacagaggaauaugcccuaggugucguuggcgugcucgaguccuacauugggucuaucaauaacauuacuaagcaaucggcguguguagcuaugucaaaacugcuuacggagcugaauagcgaugacaucaagaaguugagggauaacgaggaaccgaauagucccaaaauacggguguauaacaccgucaucuccuacauugaaucuaaucgcaagaacaauaaacagacaauccaccuccugaagagacugccugccgacgugcucaaaaagacuauuaagaacaccuuagauauccauaaaagcauaacaauuaauaacccaaaggaguccaccguuaacgacacuaaugaucacgccaaaaacaaugacacaaccugaggacuagugcaucacauuuaaaagcaucucagccuaccaugagaauaagagaaagaaaaugaagaucaauagcuuauucaucucuuuuucuuuuucguugguguaaagccaacacccugucuaaaaaacauaaauuucuuuaaucauuuugccucuuuucucugugcuucaauuaauaaaaaauggaaagaaccuagaucuaaaaaaaaaaaaaaaaaaaaaaaaaaaaaaaaaaaaaaaaaaaaaaaaaaaaaaaaaaaaaaaaugcaucccccccccccccccccccccccccccccccaaaggcucuuuucagagccaccagaauu

SEQ ID NO: 21300 - RNA, 971 nt, Artificial Sequence
  mRNA product Design i-2 comprising derived and/or modified sequence from HRSV(Memphis-37)__AIY60641.1__M2-1 (opt4)
gggagaggcgcugccuacggagguggcagccaucuccuucucggcaucaagcuuaccaugagcagaagaaaccccugcaaguucgagaucagaggccacugccugaacggcaagagaugccacuucagccacaacuacuucgaguggcccccccacgcccugcuggugagacagaacuucaugcugaacagaauccugaagagcauggacaagagcaucgacacccugagcgagaucagcggcgccgccgagcuggacagaaccgaggaguacgcccugggcguggugggcgugcuggagagcuacaucggcagcaucaacaacaucaccaagcagagcgccugcguggccaugagcaagcugcugaccgagcugaacagcgacgacaucaagaagcugagagacaacgaggagcccaacagccccaagaucagaguguacaacaccgugaucagcuacaucgagagcaacagaaagaacaacaagcagaccauccaccugcugaagagacugcccgccgacgugcugaagaagaccaucaagaacacccuggacauccacaagagcaucaccaucaacaaccccaaggagagcaccgugaacgacaccaacgaccacgccaagaacaacgacaccaccugaggacuagugcaucacauuuaaaagcaucucagccuaccaugagaauaagagaaagaaaaugaagaucaauagcuuauucaucucuuuuucuuuuucguugguguaaagccaacacccugucuaaaaaacauaaauuucuuuaaucauuuugccucuuuucucugugcuucaauuaauaaaaaauggaaagaaccuagaucuaaaaaaaaaaaaaaaaaaaaaaaaaaaaaaaaaaaaaaaaaaaaaaaaaaaaaaaaaaaaaaaaugcaucccccccccccccccccccccccccccccccaaaggcucuuuucagagccaccagaauu

SEQ ID NO: 21301 - RNA, 971 nt, Artificial Sequence
  mRNA product Design i-2 comprising derived and/or modified sequence from HRSV(Memphis-37)__AIY60641.1__M2-1 (opt5)
gggagaggcgcugccuacggagguggcagccaucuccuucucggcaucaagcuuaccaugagcagacggaaccccugcaaguucgagauccgcggccacugucugaaugggaaaagaugccauuuuucccacaacuacuucgaauggccuccgcaugcccuccuggugcggcagaauuuuaugcuuaaccgcauucugaagucuauggacaaaagcaucgauacccucuccgagauuucuggagcugccgaacuggacagaacagaggaauaugcgcuuggcgucguuggggugcuggagagcuacaucggauccauuaauaacaucacgaagcaaucugcuuguguggccaugagcaaacuccugaccgagcucaauuccgaugacaucaagaagcugcgggauaacgaggaacccaauagcccuaaaauucgcgucuauaacacagugaucucuuacauugaauccaauagaaagaacaauaaacagaccauccaucugcuuaagcggcugcccgccgacguucucaaaaagacaauuaagaacacccuggauauccacaaaagcauuacaaucaauaacccuaaggagucuaccgugaacgacacgaaugaucacgcuaaaaacaaugacaccacaugaggacuagugcaucacauuuaaaagcaucucagccuaccaugagaauaagagaaagaaaaugaagaucaauagcuuauucaucucuuuuucuuuuucguugguguaaagccaacacccugucuaaaaaacauaaauuucuuuaaucauuuugccucuuuucucugugcuucaauuaauaaaaaauggaaagaaccuagaucuaaaaaaaaaaaaaaaaaaaaaaaaaaaaaaaaaaaaaaaaaaaaaaaaaaaaaaaaaaaaaaaaugcaucccccccccccccccccccccccccccccccaaaggcucuuuucagagccaccagaauu

SEQ ID NO: 21302 - RNA, 971 nt, Artificial Sequence
  mRNA product Design i-2 comprising derived and/or modified sequence from HRSV(Memphis-37)__AIY60641.1__M2-1 (opt6)
gggagaggcgcugccuacggagguggcagccaucuccuucucggcaucaagcuuaccauguccagacgaaacccaugcaaauucgaaauaagaggacacugccuaaacggaaaaagaugccacuucucacacaacuacuucgaauggccaccacacgcacuccucguaagacaaaacuucaugcuaaacagaauacuaaaaucaauggacaaaucaauagacacacucucagaaauaucaggagcagcagaacuagaccgaacagaagaauacgcacuaggaguaguaggaguacuagaauccuacauaggaucaauaaacaacauaacaaaacaaucagcaugcguagcaaugucaaaacuacuaacagaauuaaacucagacgacauaaaaaaacuaagagacaacgaagaaccaaacucaccaaaaauaagaguauacaacaccguaauaucauacauagaaucaaacagaaaaaacaacaaacaaacaauacaccuacuaaaaagacuaccagcagacguccuaaaaaaaacaauaaaaaacacacucgacauacacaaaucaauaaccauaaacaacccaaaagaaucaacaguaaacgacaccaacgaccacgcaaaaaacaaugacacaacauaaggacuagugcaucacauuuaaaagcaucucagccuaccaugagaauaagagaaagaaaaugaagaucaauagcuuauucaucucuuuuucuuuuucguugguguaaagccaacacccugucuaaaaaacauaaauuucuuuaaucauuuugccucuuuucucugugcuucaauuaauaaaaaauggaaagaaccuagaucuaaaaaaaaaaaaaaaaaaaaaaaaaaaaaaaaaaaaaaaaaaaaaaaaaaaaaaaaaaaaaaaaugcaucccccccccccccccccccccccccccccccaaaggcucuuuucagagccaccagaauu

SEQ ID NO: 21303 - RNA, 971 nt, Artificial Sequence
  mRNA product Design i-2 comprising derived and/or modified sequence from HRSV(Memphis-37)__AIY60641.1__M2-1 (opt11)
gggagaggcgcugccuacggagguggcagccaucuccuucucggcaucaagcuuaccaugucccgacgcaaccccugcaaauucgaaauccgaggccacugccucaacggcaaacgcugccacuucucccacaacuacuucgaauggcccccccacgcccuccucguacgccaaaacuucaugcucaaccgaauccucaagucaauggacaaauccaucgacacccucuccgaaaucuccggcgccgccgaacucgaccgcaccgaagaauacgcccucggcgucgucggcguccucgaauccuacaucggcuccaucaacaacaucaccaaacaauccgccugcgucgccauguccaaacuccucaccgaacucaacuccgacgacaucaaaaaacuccgcgacaacgaagaacccaacucccccaaaauccgcgucuacaacaccguuaucuccuacaucgaauccaaccgaaaaaacaacaaacaaaccauccaccuccucaaacgacuccccgccgacguccucaaaaaaaccaucaaaaauacccuagacauccacaaauccaucaccaucaacaaccccaaagaauccaccgucaacgacaccaacgaccacgccaaaaacaacgacaccaccuaaggacuagugcaucacauuuaaaagcaucucagccuaccaugagaauaagagaaagaaaaugaagaucaauagcuuauucaucucuuuuucuuuuucguugguguaaagccaacacccugucuaaaaaacauaaauuucuuuaaucauuuugccucuuuucucugugcuucaauuaauaaaaaauggaaagaaccuagaucuaaaaaaaaaaaaaaaaaaaaaaaaaaaaaaaaaaaaaaaaaaaaaaaaaaaaaaaaaaaaaaaaugcaucccccccccccccccccccccccccccccccaaaggcucuuuucagagccaccagaauu

SEQ ID NO: 21304 - RNA, 967 nt, Artificial Sequence
  mRNA product Design i-2 comprising derived and/or modified sequence from HRSV(Memphis-37)__AIY60641.1__M2-1 (wt)
ggggcgcugccuacggagguggcagccaucuccuucucggcaucaagcuuaccaugucacgaaggaauccuugcaaauuugaaauucgaggucauugcuugaaugguaagaggugucauuuuagucauaauuauuuugaauggccaccccaugcacugcuuguaagacaaaacuuuauguuaaacagaauacuuaagucuauggauaaaagcauagauacuuuaucagaaauaaguggagcugcagaguuggacagaacugaagaguaugcccucgguguaguuggagugcuagagaguuauauaggaucaauaaauaauauaacuaaacaaucagcauguguugccaugagcaaacuccucacugaacucaacagugaugacaucaaaaaacuaagagauaaugaagagccaaauucaccuaagauaagaguguacaauacugucauaucauauauugaaagcaacaggaaaaacaauaaacaaacuauccaucuguuaaaaagauugccagcagacguauugaagaaaaccaucaaaaacacauuggauauccacaagagcauaaccaucaacaacccaaaagaaucaacuguuaaugauacaaaugaccaugccaaaaauaaugauacuaccugaggacuagugcaucacauuuaaaagcaucucagccuaccaugagaauaagagaaagaaaaugaagaucaauagcuuauucaucucuuuuucuuuuucguugguguaaagccaacacccugucuaaaaaacauaaauuucuuuaaucauuuugccucuuuucucugugcuucaauuaauaaaaaauggaaagaaccuagaucuaaaaaaaaaaaaaaaaaaaaaaaaaaaaaaaaaaaaaaaaaaaaaaaaaaaaaaaaaaaaaaaaugcaucccccccccccccccccccccccccccccccaaaggcucuuuucagagccaccagaauu

SEQ ID NO: 21305 - RNA, 967 nt, Artificial Sequence
  mRNA product Design i-2 comprising derived and/or modified sequence from HRSV(Memphis-37)__AIY60641.1__M2-1 (opt1)
ggggcgcugccuacggagguggcagccaucuccuucucggcaucaagcuuaccaugagccgccggaaccccugcaaguucgagauccgcggccacugccugaacgggaagcggugccacuucucccacaacuacuucgaguggccgccccacgcccuccuggugcgccagaacuucaugcugaaccggauccucaagagcauggacaaguccaucgacacccugagcgagaucuccggcgccgcggagcuggaccgcaccgaggaguacgcccucggggucgugggcgugcuggagagcuacaucggguccaucaacaacaucacgaagcagagcgccugcgucgccauguccaagcugcucaccgagcugaacagcgacgacaucaagaagcugcgggacaacgaggagcccaacucccccaagauccgcguguacaacaccgugaucagcuacaucgaguccaaccggaagaacaacaagcagaccauccaccuccugaagcgccugccggccgacguccucaagaagacgaucaagaacacccuggacauccacaagagcaucaccaucaacaaccccaaggaguccaccgugaacgacacgaacgaccacgcgaagaacaacgacaccaccugaggacuagugcaucacauuuaaaagcaucucagccuaccaugagaauaagagaaagaaaaugaagaucaauagcuuauucaucucuuuuucuuuuucguugguguaaagccaacacccugucuaaaaaacauaaauuucuuuaaucauuuugccucuuuucucugugcuucaauuaauaaaaaauggaaagaaccuagaucuaaaaaaaaaaaaaaaaaaaaaaaaaaaaaaaaaaaaaaaaaaaaaaaaaaaaaaaaaaaaaaaaugcaucccccccccccccccccccccccccccccccaaaggcucuuuucagagccaccagaauu

SEQ ID NO: 21306 - RNA, 967 nt, Artificial Sequence
  mRNA product Design i-2 comprising derived and/or modified sequence from HRSV(Memphis-37)__AIY60641.1__M2-1 (opt2)
ggggcgcugccuacggagguggcagccaucuccuucucggcaucaagcuuaccaugucccgccgcaaccccugcaaguucgagauccgcggccacugccucaacggcaagcgcugccacuucucccacaacuacuucgaguggcccccccacgcccuccucguccgccagaacuucaugcucaaccgcauccucaaguccauggacaaguccaucgacacccucuccgagaucuccggcgccgccgagcucgaccgcaccgaggaguacgcccucggcgucgucggcguccucgaguccuacaucggcuccaucaacaacaucaccaagcaguccgccugcgucgccauguccaagcuccucaccgagcucaacuccgacgacaucaagaagcuccgcgacaacgaggagcccaacucccccaagauccgcgucuacaacaccgucaucuccuacaucgaguccaaccgcaagaacaacaagcagaccauccaccuccucaagcgccuccccgccgacguccucaagaagaccaucaagaacacccucgacauccacaaguccaucaccaucaacaaccccaaggaguccaccgucaacgacaccaacgaccacgccaagaacaacgacaccaccugaggacuagugcaucacauuuaaaagcaucucagccuaccaugagaauaagagaaagaaaaugaagaucaauagcuuauucaucucuuuuucuuuuucguugguguaaagccaacacccugucuaaaaaacauaaauuucuuuaaucauuuugccucuuuucucugugcuucaauuaauaaaaaauggaaagaaccuagaucuaaaaaaaaaaaaaaaaaaaaaaaaaaaaaaaaaaaaaaaaaaaaaaaaaaaaaaaaaaaaaaaaugcaucccccccccccccccccccccccccccccccaaaggcucuuuucagagccaccagaauu

SEQ ID NO: 21307 - RNA, 967 nt, Artificial Sequence
  mRNA product Design i-2 comprising derived and/or modified sequence from HRSV(Memphis-37)__AIY60641.1__M2-1 (opt3)
ggggcgcugccuacggagguggcagccaucuccuucucggcaucaagcuuaccaugagcagaaggaaccccugcaaguucgagauccggggccacugucugaaugggaaacgcugccauuuuucccacaacuacuucgaauggccuccacaugcacuccuugugcgacagaauuuuaugcugaaccguauuuugaagucuauggacaaaucaauagauaccuuaagugagaucagcggagcugcagaacuggacagaacagaggaauaugcccuaggugucguuggcgugcucgaguccuacauugggucuaucaauaacauuacuaagcaaucggcguguguagcuaugucaaaacugcuuacggagcugaauagcgaugacaucaagaaguugagggauaacgaggaaccgaauagucccaaaauacggguguauaacaccgucaucuccuacauugaaucuaaucgcaagaacaauaaacagacaauccaccuccugaagagacugccugccgacgugcucaaaaagacuauuaagaacaccuuagauauccauaaaagcauaacaauuaauaacccaaaggaguccaccguuaacgacacuaaugaucacgccaaaaacaaugacacaaccugaggacuagugcaucacauuuaaaagcaucucagccuaccaugagaauaagagaaagaaaaugaagaucaauagcuuauucaucucuuuuucuuuuucguugguguaaagccaacacccugucuaaaaaacauaaauuucuuuaaucauuuugccucuuuucucugugcuucaauuaauaaaaaauggaaagaaccuagaucuaaaaaaaaaaaaaaaaaaaaaaaaaaaaaaaaaaaaaaaaaaaaaaaaaaaaaaaaaaaaaaaaugcaucccccccccccccccccccccccccccccccaaaggcucuuuucagagccaccagaauu

SEQ ID NO: 21308 - RNA, 967 nt, Artificial Sequence
  mRNA product Design i-2 comprising derived and/or modified sequence from HRSV(Memphis-37)__AIY60641.1__M2-1 (opt4)
ggggcgcugccuacggagguggcagccaucuccuucucggcaucaagcuuaccaugagcagaagaaaccccugcaaguucgagaucagaggccacugccugaacggcaagagaugccacuucagccacaacuacuucgaguggcccccccacgcccugcuggugagacagaacuucaugcugaacagaauccugaagagcauggacaagagcaucgacacccugagcgagaucagcggcgccgccgagcuggacagaaccgaggaguacgcccugggcguggugggcgugcuggagagcuacaucggcagcaucaacaacaucaccaagcagagcgccugcguggccaugagcaagcugcugaccgagcugaacagcgacgacaucaagaagcugagagacaacgaggagcccaacagccccaagaucagaguguacaacaccgugaucagcuacaucgagagcaacagaaagaacaacaagcagaccauccaccugcugaagagacugcccgccgacgugcugaagaagaccaucaagaacacccuggacauccacaagagcaucaccaucaacaaccccaaggagagcaccgugaacgacaccaacgaccacgccaagaacaacgacaccaccugaggacuagugcaucacauuuaaaagcaucucagccuaccaugagaauaagagaaagaaaaugaagaucaauagcuuauucaucucuuuuucuuuuucguugguguaaagccaacacccugucuaaaaaacauaaauuucuuuaaucauuuugccucuuuucucugugcuucaauuaauaaaaaauggaaagaaccuagaucuaaaaaaaaaaaaaaaaaaaaaaaaaaaaaaaaaaaaaaaaaaaaaaaaaaaaaaaaaaaaaaaaugcaucccccccccccccccccccccccccccccccaaaggcucuuuucagagccaccagaauu

SEQ ID NO: 21309 - RNA, 967 nt, Artificial Sequence
  mRNA product Design i-2 comprising derived and/or modified sequence from HRSV(Memphis-37)__AIY60641.1__M2-1 (opt5)
ggggcgcugccuacggagguggcagccaucuccuucucggcaucaagcuuaccaugagcagacggaaccccugcaaguucgagauccgcggccacugucugaaugggaaaagaugccauuuuucccacaacuacuucgaauggccuccgcaugcccuccuggugcggcagaauuuuaugcuuaaccgcauucugaagucuauggacaaaagcaucgauacccucuccgagauuucuggagcugccgaacuggacagaacagaggaauaugcgcuuggcgucguuggggugcuggagagcuacaucggauccauuaauaacaucacgaagcaaucugcuuguguggccaugagcaaacuccugaccgagcucaauuccgaugacaucaagaagcugcgggauaacgaggaacccaauagcccuaaaauucgcgucuauaacacagugaucucuuacauugaauccaauagaaagaacaauaaacagaccauccaucugcuuaagcggcugcccgccgacguucucaaaaagacaauuaagaacacccuggauauccacaaaagcauuacaaucaauaacccuaaggagucuaccgugaacgacacgaaugaucacgcuaaaaacaaugacaccacaugaggacuagugcaucacauuuaaaagcaucucagccuaccaugagaauaagagaaagaaaaugaagaucaauagcuuauucaucucuuuuucuuuuucguugguguaaagccaacacccugucuaaaaaacauaaauuucuuuaaucauuuugccucuuuucucugugcuucaauuaauaaaaaauggaaagaaccuagaucuaaaaaaaaaaaaaaaaaaaaaaaaaaaaaaaaaaaaaaaaaaaaaaaaaaaaaaaaaaaaaaaaugcaucccccccccccccccccccccccccccccccaaaggcucuuuucagagccaccagaauu

SEQ ID NO: 21310 - RNA, 967 nt, Artificial Sequence
  mRNA product Design i-2 comprising derived and/or modified sequence from HRSV(Memphis-37)__AIY60641.1__M2-1 (opt6)
ggggcgcugccuacggagguggcagccaucuccuucucggcaucaagcuuaccauguccagacgaaacccaugcaaauucgaaauaagaggacacugccuaaacggaaaaagaugccacuucucacacaacuacuucgaauggccaccacacgcacuccucguaagacaaaacuucaugcuaaacagaauacuaaaaucaauggacaaaucaauagacacacucucagaaauaucaggagcagcagaacuagaccgaacagaagaauacgcacuaggaguaguaggaguacuagaauccuacauaggaucaauaaacaacauaacaaaacaaucagcaugcguagcaaugucaaaacuacuaacagaauuaaacucagacgacauaaaaaaacuaagagacaacgaagaaccaaacucaccaaaaauaagaguauacaacaccguaauaucauacauagaaucaaacagaaaaaacaacaaacaaacaauacaccuacuaaaaagacuaccagcagacguccuaaaaaaaacaauaaaaaacacacucgacauacacaaaucaauaaccauaaacaacccaaaagaaucaacaguaaacgacaccaacgaccacgcaaaaaacaaugacacaacauaaggacuagugcaucacauuuaaaagcaucucagccuaccaugagaauaagagaaagaaaaugaagaucaauagcuuauucaucucuuuuucuuuuucguugguguaaagccaacacccugucuaaaaaacauaaauuucuuuaaucauuuugccucuuuucucugugcuucaauuaauaaaaaauggaaagaaccuagaucuaaaaaaaaaaaaaaaaaaaaaaaaaaaaaaaaaaaaaaaaaaaaaaaaaaaaaaaaaaaaaaaaugcaucccccccccccccccccccccccccccccccaaaggcucuuuucagagccaccagaauu

SEQ ID NO: 21311 - RNA, 967 nt, Artificial Sequence
  mRNA product Design i-2 comprising derived and/or modified sequence from HRSV(Memphis-37)__AIY60641.1__M2-1 (opt11)
ggggcgcugccuacggagguggcagccaucuccuucucggcaucaagcuuaccaugucccgacgcaaccccugcaaauucgaaauccgaggccacugccucaacggcaaacgcugccacuucucccacaacuacuucgaauggcccccccacgcccuccucguacgccaaaacuucaugcucaaccgaauccucaagucaauggacaaauccaucgacacccucuccgaaaucuccggcgccgccgaacucgaccgcaccgaagaauacgcccucggcgucgucggcguccucgaauccuacaucggcuccaucaacaacaucaccaaacaauccgccugcgucgccauguccaaacuccucaccgaacucaacuccgacgacaucaaaaaacuccgcgacaacgaagaacccaacucccccaaaauccgcgucuacaacaccguuaucuccuacaucgaauccaaccgaaaaaacaacaaacaaaccauccaccuccucaaacgacuccccgccgacguccucaaaaaaaccaucaaaaauacccuagacauccacaaauccaucaccaucaacaaccccaaagaauccaccgucaacgacaccaacgaccacgccaaaaacaacgacaccaccuaaggacuagugcaucacauuuaaaagcaucucagccuaccaugagaauaagagaaagaaaaugaagaucaauagcuuauucaucucuuuuucuuuuucguugguguaaagccaacacccugucuaaaaaacauaaauuucuuuaaucauuuugccucuuuucucugugcuucaauuaauaaaaaauggaaagaaccuagaucuaaaaaaaaaaaaaaaaaaaaaaaaaaaaaaaaaaaaaaaaaaaaaaaaaaaaaaaaaaaaaaaaugcaucccccccccccccccccccccccccccccccaaaggcucuuuucagagccaccagaauu

SEQ ID NO: 21312 - RNA, 802 nt, Artificial Sequence
  mRNA product Design i-3 comprising derived and/or modified sequence from HRSV(Memphis-37)__AIY60641.1__M2-1 (wt)
gggagaaagcuuaccaugucacgaaggaauccuugcaaauuugaaauucgaggucauugcuugaaugguaagaggugucauuuuagucauaauuauuuugaauggccaccccaugcacugcuuguaagacaaaacuuuauguuaaacagaauacuuaagucuauggauaaaagcauagauacuuuaucagaaauaaguggagcugcagaguuggacagaacugaagaguaugcccucgguguaguuggagugcuagagaguuauauaggaucaauaaauaauauaacuaaacaaucagcauguguugccaugagcaaacuccucacugaacucaacagugaugacaucaaaaaacuaagagauaaugaagagccaaauucaccuaagauaagaguguacaauacugucauaucauauauugaaagcaacaggaaaaacaauaaacaaacuauccaucuguuaaaaagauugccagcagacguauugaagaaaaccaucaaaaacacauuggauauccacaagagcauaaccaucaacaacccaaaagaaucaacuguuaaugauacaaaugaccaugccaaaaauaaugauacuaccugaggacuaguuauaagacugacuagcccgaugggccucccaacgggcccuccuccccuccuugcaccgagauuaauaaaaaaaaaaaaaaaaaaaaaaaaaaaaaaaaaaaaaaaaaaaaaaaaaaaaaaaaaaaaaaaaugcaucccccccccccccccccccccccccccccccaaaggcucuuuucagagccaccagaauu

SEQ ID NO: 21313 - RNA, 802 nt, Artificial Sequence
  mRNA product Design i-3 comprising derived and/or modified sequence from HRSV(Memphis-37)__AIY60641.1__M2-1 (opt1)
gggagaaagcuuaccaugagccgccggaaccccugcaaguucgagauccgcggccacugccugaacgggaagcggugccacuucucccacaacuacuucgaguggccgccccacgcccuccuggugcgccagaacuucaugcugaaccggauccucaagagcauggacaaguccaucgacacccugagcgagaucuccggcgccgcggagcuggaccgcaccgaggaguacgcccucggggucgugggcgugcuggagagcuacaucggguccaucaacaacaucacgaagcagagcgccugcgucgccauguccaagcugcucaccgagcugaacagcgacgacaucaagaagcugcgggacaacgaggagcccaacucccccaagauccgcguguacaacaccgugaucagcuacaucgaguccaaccggaagaacaacaagcagaccauccaccuccugaagcgccugccggccgacguccucaagaagacgaucaagaacacccuggacauccacaagagcaucaccaucaacaaccccaaggaguccaccgugaacgacacgaacgaccacgcgaagaacaacgacaccaccugaggacuaguuauaagacugacuagcccgaugggccucccaacgggcccuccuccccuccuugcaccgagauuaauaaaaaaaaaaaaaaaaaaaaaaaaaaaaaaaaaaaaaaaaaaaaaaaaaaaaaaaaaaaaaaaaugcaucccccccccccccccccccccccccccccccaaaggcucuuuucagagccaccagaauu

SEQ ID NO: 21314 - RNA, 802 nt, Artificial Sequence
  mRNA product Design i-3 comprising derived and/or modified sequence from HRSV(Memphis-37)__AIY60641.1__M2-1 (opt2)
gggagaaagcuuaccaugucccgccgcaaccccugcaaguucgagauccgcggccacugccucaacggcaagcgcugccacuucucccacaacuacuucgaguggcccccccacgcccuccucguccgccagaacuucaugcucaaccgcauccucaaguccauggacaaguccaucgacacccucuccgagaucuccggcgccgccgagcucgaccgcaccgaggaguacgcccucggcgucgucggcguccucgaguccuacaucggcuccaucaacaacaucaccaagcaguccgccugcgucgccauguccaagcuccucaccgagcucaacuccgacgacaucaagaagcuccgcgacaacgaggagcccaacucccccaagauccgcgucuacaacaccgucaucuccuacaucgaguccaaccgcaagaacaacaagcagaccauccaccuccucaagcgccuccccgccgacguccucaagaagaccaucaagaacacccucgacauccacaaguccaucaccaucaacaaccccaaggaguccaccgucaacgacaccaacgaccacgccaagaacaacgacaccaccugaggacuaguuauaagacugacuagcccgaugggccucccaacgggcccuccuccccuccuugcaccgagauuaauaaaaaaaaaaaaaaaaaaaaaaaaaaaaaaaaaaaaaaaaaaaaaaaaaaaaaaaaaaaaaaaaugcaucccccccccccccccccccccccccccccccaaaggcucuuuucagagccaccagaauu

SEQ ID NO: 21315 - RNA, 802 nt, Artificial Sequence
  mRNA product Design i-3 comprising derived and/or modified sequence from HRSV(Memphis-37)__AIY60641.1__M2-1 (opt3)
gggagaaagcuuaccaugagcagaaggaaccccugcaaguucgagauccggggccacugucugaaugggaaacgcugccauuuuucccacaacuacuucgaauggccuccacaugcacuccuugugcgacagaauuuuaugcugaaccguauuuugaagucuauggacaaaucaauagauaccuuaagugagaucagcggagcugcagaacuggacagaacagaggaauaugcccuaggugucguuggcgugcucgaguccuacauugggucuaucaauaacauuacuaagcaaucggcguguguagcuaugucaaaacugcuuacggagcugaauagcgaugacaucaagaaguugagggauaacgaggaaccgaauagucccaaaauacggguguauaacaccgucaucuccuacauugaaucuaaucgcaagaacaauaaacagacaauccaccuccugaagagacugccugccgacgugcucaaaaagacuauuaagaacaccuuagauauccauaaaagcauaacaauuaauaacccaaaggaguccaccguuaacgacacuaaugaucacgccaaaaacaaugacacaaccugaggacuaguuauaagacugacuagcccgaugggccucccaacgggcccuccuccccuccuugcaccgagauuaauaaaaaaaaaaaaaaaaaaaaaaaaaaaaaaaaaaaaaaaaaaaaaaaaaaaaaaaaaaaaaaaaugcaucccccccccccccccccccccccccccccccaaaggcucuuuucagagccaccagaauu

SEQ ID NO: 21316 - RNA, 802 nt, Artificial Sequence
  mRNA product Design i-3 comprising derived and/or modified sequence from HRSV(Memphis-37)__AIY60641.1__M2-1 (opt4)
gggagaaagcuuaccaugagcagaagaaaccccugcaaguucgagaucagaggccacugccugaacggcaagagaugccacuucagccacaacuacuucgaguggcccccccacgcccugcuggugagacagaacuucaugcugaacagaauccugaagagcauggacaagagcaucgacacccugagcgagaucagcggcgccgccgagcuggacagaaccgaggaguacgcccugggcguggugggcgugcuggagagcuacaucggcagcaucaacaacaucaccaagcagagcgccugcguggccaugagcaagcugcugaccgagcugaacagcgacgacaucaagaagcugagagacaacgaggagcccaacagccccaagaucagaguguacaacaccgugaucagcuacaucgagagcaacagaaagaacaacaagcagaccauccaccugcugaagagacugcccgccgacgugcugaagaagaccaucaagaacacccuggacauccacaagagcaucaccaucaacaaccccaaggagagcaccgugaacgacaccaacgaccacgccaagaacaacgacaccaccugaggacuaguuauaagacugacuagcccgaugggccucccaacgggcccuccuccccuccuugcaccgagauuaauaaaaaaaaaaaaaaaaaaaaaaaaaaaaaaaaaaaaaaaaaaaaaaaaaaaaaaaaaaaaaaaaugcaucccccccccccccccccccccccccccccccaaaggcucuuuucagagccaccagaauu

SEQ ID NO: 21317 - RNA, 802 nt, Artificial Sequence
  mRNA product Design i-3 comprising derived and/or modified sequence from HRSV(Memphis-37)__AIY60641.1__M2-1 (opt5)
gggagaaagcuuaccaugagcagacggaaccccugcaaguucgagauccgcggccacugucugaaugggaaaagaugccauuuuucccacaacuacuucgaauggccuccgcaugcccuccuggugcggcagaauuuuaugcuuaaccgcauucugaagucuauggacaaaagcaucgauacccucuccgagauuucuggagcugccgaacuggacagaacagaggaauaugcgcuuggcgucguuggggugcuggagagcuacaucggauccauuaauaacaucacgaagcaaucugcuuguguggccaugagcaaacuccugaccgagcucaauuccgaugacaucaagaagcugcgggauaacgaggaacccaauagcccuaaaauucgcgucuauaacacagugaucucuuacauugaauccaauagaaagaacaauaaacagaccauccaucugcuuaagcggcugcccgccgacguucucaaaaagacaauuaagaacacccuggauauccacaaaagcauuacaaucaauaacccuaaggagucuaccgugaacgacacgaaugaucacgcuaaaaacaaugacaccacaugaggacuaguuauaagacugacuagcccgaugggccucccaacgggcccuccuccccuccuugcaccgagauuaauaaaaaaaaaaaaaaaaaaaaaaaaaaaaaaaaaaaaaaaaaaaaaaaaaaaaaaaaaaaaaaaaugcaucccccccccccccccccccccccccccccccaaaggcucuuuucagagccaccagaauu

SEQ ID NO: 21318 - RNA, 802 nt, Artificial Sequence
  mRNA product Design i-3 comprising derived and/or modified sequence from HRSV(Memphis-37)__AIY60641.1__M2-1 (opt6)
gggagaaagcuuaccauguccagacgaaacccaugcaaauucgaaauaagaggacacugccuaaacggaaaaagaugccacuucucacacaacuacuucgaauggccaccacacgcacuccucguaagacaaaacuucaugcuaaacagaauacuaaaaucaauggacaaaucaauagacacacucucagaaauaucaggagcagcagaacuagaccgaacagaagaauacgcacuaggaguaguaggaguacuagaauccuacauaggaucaauaaacaacauaacaaaacaaucagcaugcguagcaaugucaaaacuacuaacagaauuaaacucagacgacauaaaaaaacuaagagacaacgaagaaccaaacucaccaaaaauaagaguauacaacaccguaauaucauacauagaaucaaacagaaaaaacaacaaacaaacaauacaccuacuaaaaagacuaccagcagacguccuaaaaaaaacaauaaaaaacacacucgacauacacaaaucaauaaccauaaacaacccaaaagaaucaacaguaaacgacaccaacgaccacgcaaaaaacaaugacacaacauaaggacuaguuauaagacugacuagcccgaugggccucccaacgggcccuccuccccuccuugcaccgagauuaauaaaaaaaaaaaaaaaaaaaaaaaaaaaaaaaaaaaaaaaaaaaaaaaaaaaaaaaaaaaaaaaaugcaucccccccccccccccccccccccccccccccaaaggcucuuuucagagccaccagaauu

SEQ ID NO: 21319 - RNA, 802 nt, Artificial Sequence
  mRNA product Design i-3 comprising derived and/or modified sequence from HRSV(Memphis-37)__AIY60641.1__M2-1 (opt11)
gggagaaagcuuaccaugucccgacgcaaccccugcaaauucgaaauccgaggccacugccucaacggcaaacgcugccacuucucccacaacuacuucgaauggcccccccacgcccuccucguacgccaaaacuucaugcucaaccgaauccucaagucaauggacaaauccaucgacacccucuccgaaaucuccggcgccgccgaacucgaccgcaccgaagaauacgcccucggcgucgucggcguccucgaauccuacaucggcuccaucaacaacaucaccaaacaauccgccugcgucgccauguccaaacuccucaccgaacucaacuccgacgacaucaaaaaacuccgcgacaacgaagaacccaacucccccaaaauccgcgucuacaacaccguuaucuccuacaucgaauccaaccgaaaaaacaacaaacaaaccauccaccuccucaaacgacuccccgccgacguccucaaaaaaaccaucaaaaauacccuagacauccacaaauccaucaccaucaacaaccccaaagaauccaccgucaacgacaccaacgaccacgccaaaaacaacgacaccaccuaaggacuaguuauaagacugacuagcccgaugggccucccaacgggcccuccuccccuccuugcaccgagauuaauaaaaaaaaaaaaaaaaaaaaaaaaaaaaaaaaaaaaaaaaaaaaaaaaaaaaaaaaaaaaaaaaugcaucccccccccccccccccccccccccccccccaaaggcucuuuucagagccaccagaauu

SEQ ID NO: 21320 - protein, 18 aa, Artificial Sequence
  derived and/or modified protein sequence (artificial) from Artificial__carrier peptide 5
CGHHHHHRRRRHHHHHGC

SEQ ID NO: 21321 - RNA, 6 nt, Artificial Sequence
  mRNA 5'-end
aggaga

SEQ ID NO: 21322 - RNA, 134 nt, Artificial Sequence
  mRNA 3'-end N6-A64-N5-C30-histoneSL-N5
auuaauaaaaaaaaaaaaaaaaaaaaaaaaaaaaaaaaaaaaaaaaaaaaaaaaaaaaaaaaaaaaaaaaugcaucccccccccccccccccccccccccccccccaaaggcucuuuucagagccaccagaauu

SEQ ID NO: 21323 - RNA, 99 nt, Artificial Sequence
  mRNA 3'-end N6-histoneSL-A64-N5
auuaaucaaaggcucuuuucagagccaccaaaaaaaaaaaaaaaaaaaaaaaaaaaaaaaaaaaaaaaaaaaaaaaaaaaaaaaaaaaaaaaaagaauu

SEQ ID NO: 21324 - RNA, 99 nt, Artificial Sequence
  mRNA 3'-end N6-histoneSL-A64-N5
agaucucaaaggcucuuuucagagccaccaaaaaaaaaaaaaaaaaaaaaaaaaaaaaaaaaaaaaaaaaaaaaaaaaaaaaaaaaaaaaaaaagaauu

SEQ ID NO: 21325 - RNA, 110 nt, Artificial Sequence
  mRNA 3'-end N12-A64-N5-histoneSL-N5
auuaauagaucuaaaaaaaaaaaaaaaaaaaaaaaaaaaaaaaaaaaaaaaaaaaaaaaaaaaaaaaaaaaaaaaaugcaucaaaggcucuuuucagagccaccagaauu

SEQ ID NO: 21326 - RNA, 110 nt, Artificial Sequence; identical to SEQ ID NO: 21325
  mRNA 3'-end N12-A64-N5-histoneSL-N5

SEQ ID NO: 21327 - RNA, 130 nt, Artificial Sequence
  mRNA 3'-end N6-histoneSL-A100
auuaaucaaaggcucuuuucagagccaccaaaaaaaaaaaaaaaaaaaaaaaaaaaaaaaaaaaaaaaaaaaaaaaaaaaaaaaaaaaaaaaaaaaaaaaaaaaaaaaaaaaaaaaaaaaaaaaaaaaaa

SEQ ID NO: 21328 - RNA, 130 nt, Artificial Sequence
  mRNA 3'-end N6-histoneSL-A100
agaucucaaaggcucuuuucagagccaccaaaaaaaaaaaaaaaaaaaaaaaaaaaaaaaaaaaaaaaaaaaaaaaaaaaaaaaaaaaaaaaaaaaaaaaaaaaaaaaaaaaaaaaaaaaaaaaaaaaaa

SEQ ID NO: 21329 - protein, 24 aa, Artificial Sequence
  derived and/or modified protein sequence (wt) from Homo sapiens__AAA59606.1__signal peptide_HLA-A2-SP
MAVMAPRTLVLLLSGALALTQTWA

SEQ ID NO: 21330 - protein, 22 aa, Artificial Sequence
  derived and/or modified protein sequence (wt) from Homo sapiens__AAA61213.1__signal peptide_HsPLAT
MDAMKRGLCCVLLLCGAVFVSP

SEQ ID NO: 21331 - protein, 27 aa, Artificial Sequence
  derived and/or modified protein sequence (wt) from Homo sapiens__NP_000790.2__signal peptide_HsEPO
MGVHECPAWLWLLLSLLSLPLGLPVLG

SEQ ID NO: 21332 - protein, 18 aa, Artificial Sequence
  derived and/or modified protein sequence (wt) from Homo sapiens__NP_000468.1__signal peptide_HsALB
MKWVTFISLLFLFSSAYS

SEQ ID NO: 21333 - protein, 18 aa, Artificial Sequence
  derived and/or modified protein sequence (wt) from Homo sapiens__AAB59424.1__signal peptide_IgE
MDWTWILFLVAAATRVHS

SEQ ID NO: 21334 - protein, 24 aa, Artificial Sequence
  derived and/or modified protein sequence (wt) from Homo sapiens__NP_055022.2__signal peptide_HsCD5
MPMGSLQPLATLYLLGMLVASCLG

SEQ ID NO: 21335 - protein, 20 aa, Artificial Sequence
  derived and/or modified protein sequence (wt) from Homo sapiens__NP_000577.2__signal peptide_HsIL2
MYRMQLLSCIALSLALVTNS

SEQ ID NO: 21336 - protein, 18 aa, Artificial Sequence
  derived and/or modified protein sequence (wt) from Homo sapiens__NP_001020371.3 __signal peptide_HsCTRB2
MAFLWLLSCWALLGTTFG

SEQ ID NO: 21337 - protein, 19 aa, Artificial Sequence
  derived and/or modified protein sequence (wt) from Homo sapiens__BAC87457.1__signal peptide_IgG-HC
MEFGLSWVFLVALFRGVQC

SEQ ID NO: 21338 - protein, 19 aa, Artificial Sequence
  derived and/or modified protein sequence (wt) from Homo sapiens__AAA52897.1__signal peptide_Ig-HC
MDWTWRVFCLLAVTPGAHP

SEQ ID NO: 21339 - protein, 19 aa, Artificial Sequence
  derived and/or modified protein sequence (wt) from Homo sapiens__AAA59018.1__signal peptide_Ig-LC
MAWSPLFLTLITHCAGSWA

SEQ ID NO: 21340 - protein, 17 aa, Artificial Sequence
  derived and/or modified protein sequence (wt) from Gaussia princeps__AAG54095.1__signal peptide_GpLuc
MGVKVLFALICIAVAEA

SEQ ID NO: 21341 - protein, 21 aa, Artificial Sequence
  derived and/or modified protein sequence (wt) from Mus musculus__BAR42292.1__signal peptide_MmIgkappa
METDTLLLWVLLLWVPGSTGD

SEQ ID NO: 21342 - protein, 26 aa, Artificial Sequence
  derived and/or modified protein sequence (wt) from Nepenthes rafflesiana__ABF74624.1__signal peptide_NrChit1
MKTHYSSAILPILTLFVFLSINPSHG

SEQ ID NO: 21343 - protein, 21 aa, Artificial Sequence
  derived and/or modified protein sequence (wt) from Conus leopardus__AAS93426.1__signal peptide_ClLp1.3
MGMRMMFIMFMLVVLATTVVS

SEQ ID NO: 21344 - protein, 24 aa, Artificial Sequence
  derived and/or modified protein sequence (wt) from Nepenthes gracilis__AB114914.1__signal peptide_NgNep1
MASSLYSFLLALSIVYIFVAPTHS

SEQ ID NO: 21345 - protein, 19 aa, Artificial Sequence
  derived and/or modified protein sequence (wt) from Homo sapiens__NP_001691.1__signal peptide_HsAzu1
MTRLTVLALLAGLLASSRA

SEQ ID NO: 21346 - protein, 16 aa, Artificial Sequence
  derived and/or modified protein sequence (wt) from Homo sapiens__AAA51948.1__signal peptide_HsCD33
MPLLLLLPLLWAGALA

SEQ ID NO: 21347 - protein, 19 aa, Artificial Sequence
  derived and/or modified protein sequence (wt) from Vibrio cholerae__BAA06291.1__signal peptide_VcCtxB
MIKLKFGVFFTVLLSSAYA

SEQ ID NO: 21348 - protein, 20 aa, Artificial Sequence
  derived and/or modified protein sequence (wt) from Homo sapiens__NP_001890.1__signal peptide_HsCST4
MARPLCTLLLLMATLAGALA

SEQ ID NO: 21349 - protein, 24 aa, Artificial Sequence
  derived and/or modified protein sequence (wt) from Homo sapiens__AAA59172.1__signal peptide_HsIns-iso1
MALWMRLLPLLALLALWGPDPAAA

SEQ ID NO: 21350 - protein, 17 aa, Artificial Sequence
  derived and/or modified protein sequence (wt) from Homo sapiens__CAA68724.1__signal peptide_HsSPARC
MRAWIFFLLCLAGRALA

SEQ ID NO: 21351 - protein, 17 aa, Artificial Sequence
  derived and/or modified protein sequence (wt) from Inluenza A__ACQ45338.1__signal peptide_H1N1(Netherlands2009)-HA
MKAILVVLLYTFATANA

SEQ ID NO: 21352 - protein, 30 aa, Artificial Sequence
  derived and/or modified protein sequence (wt) from Yellow fever virus__NP_041726.1__signal peptide_YFV
MRGLSSRKRRSHDVLTVQFLILGMLLMTGG

SEQ ID NO: 21353 - protein, 25 aa, Artificial Sequence
  derived and/or modified protein sequence (wt) from Homo sapiens__CAA23783.1__signal peptide_MHCII
MAISGVPVLGFFIIAVLMSAQESWA

SEQ ID NO: 21354 - protein, 24 aa, Artificial Sequence
  derived and/or modified protein sequence (wt) from Japanese Encephalitis virus__AOT85928.1__signal peptide_JEV
MGKRSAGSIMWLASLAVVIACAGA

SEQ ID NO: 21355 - protein, 30 aa, Artificial Sequence
  derived and/or modified protein sequence (wt) from Japanese Encephalitis virus__AOT85928.1__signal peptide_JEV
MGRKQNKRGGNEGSIMWLASLAVVIACAGA

SEQ ID NO: 21356 - protein, 21 aa, Artificial Sequence
  derived and/or modified protein sequence (wt) from Japanese Encephalitis virus__AOT85928.1__signal peptide_JEV
MNEGSIMWLASLAVVIACAGA

SEQ ID NO: 21357 - protein, 24 aa, Artificial Sequence
  derived and/or modified protein sequence (wt) from Japanese encephalitis virus__BAE48356.1__signal peptide_JEV-prM
MLGSNSGQRVVFTILLLLVAPAYS

SEQ ID NO: 21358 - protein, 15 aa, Artificial Sequence
  derived and/or modified protein sequence (wt) from Japanese encephalitis virus__ADN94470.1__signal peptide_JEV-ER
MWLVSLAIVTACAGA

SEQ ID NO: 21359 - protein, 17 aa, Artificial Sequence
  derived and/or modified protein sequence (wt) from Vesicular stomatitis Indiana virus__NP_041715.1 __signal peptide_VSIV-G
MKCLLYLAFLFIGVNCK

SEQ ID NO: 21360 - protein, 17 aa, Artificial Sequence
  derived and/or modified protein sequence (wt) from Vesicular stomatitis Indiana virus__NP_041715.1 __signal peptide_VSIV-G(K17A)
MKCLLYLAFLFIGVNCA

SEQ ID NO: 21361 - protein, 20 aa, Artificial Sequence
  derived and/or modified protein sequence (wt) from Homo sapiens__AAH62704.1__signal peptide_HsIGK@
METPAQLLFLLLLWLPDTTG

SEQ ID NO: 21362 - protein, 20 aa, Artificial Sequence
  derived and/or modified protein sequence (wt) from Homo sapiens__NP_000575.1__signal peptide_HsCXCL8
MTSKLAVALLAAFLISAALC

SEQ ID NO: 21363 - RNA, 1725 nt, Artificial Sequence
  derived and/or modified CDS sequence (opt1) from HRSV(A2)__F0
auggagcugcucauccugaaggccaacgccaucaccaccauccugacggcggugaccuucugcuucgccagcggccagaacaucaccgaggaguucuaccaguccacgugcagcgccgucuccaagggguaccucagcgcccugcgcaccggcugguacaccuccgugaucaccaucgagcugagcaacaucaaggagaacaagugcaacgggaccgacgccaaggugaagcucaucaagcaggagcuggacaaguacaagaacgcggucacggagcugcagcuccugaugcaguccacccccgccaccaacaaccgggcccgccgggagcugccgcgcuucaugaacuacacccucaacaacgccaagaagacgaacgugacccugagcaagaagcggaagcgccgguuccugggcuuccuccugggggugggcuccgcgaucgccagcggcgucgccguguccaaggugcugcaccucgagggggaggucaacaagaucaagagcgcccugcuguccaccaacaaggccguggugagccucuccaacggcgucagcgugcugaccuccaaggugcuggaccucaagaacuacaucgacaagcagcugcugcccaucgucaacaagcagagcugcuccaucagcaacaucgagacggugaucgaguuccagcagaagaacaaccgccuccuggagaucacccgggaguucagcgugaacgcgggggucaccacccccguguccacguacaugcugaccaacagcgagcuccugucccugaucaacgacaugcccaucaccaacgaccagaagaagcucaugagcaacaacgugcagaucguccgccagcaguccuacagcaucauguccaucaucaaggaggaggugcuggccuacgugguccagcugccgcucuacggcgugaucgacacccccugcuggaagcugcacacgagcccccugugcaccaccaacaccaaggagggguccaacaucugccucacgcggaccgaccgcggcugguacugcgacaacgccggcagcgucuccuucuucccccaggccgagaccugcaaggugcagagcaaccggguguucugcgacaccaugaacucccugacgcugccgagcgaggucaaccucugcaacguggacaucuucaaccccaaguacgacugcaagaucaugaccuccaagaccgacgugagcuccagcgucaucaccucccugggggccaucgugagcugcuacggcaagacgaagugcaccgcgagcaacaagaaccgcgggaucaucaagaccuucuccaacggcugcgacuacgugagcaacaagggcgucgacaccguguccguggggaacacccuguacuacgucaacaagcaggagggcaagagccucuacgugaagggggagcccaucaucaacuucuacgacccccugguguucccguccgacgaguucgacgccagcaucucccaggucaacgagaagaucaaccagagccuggccuucauccggaaguccgacgagcugcuccacaacgugaacgccggcaagagcacgaccaacaucaugaucaccaccaucaucaucgugaucaucgucauccugcugucccucaucgccguggggcugcugcucuacugcaaggcgcgcagcacgcccgugacccuguccaaggaccagcugagcggcaucaacaacaucgccuucuccaacuga

SEQ ID NO: 21364 - RNA, 1662 nt, Artificial Sequence
  derived and/or modified CDS sequence (opt1) from HRSV(A2)__F-del
auggagcugcucauccugaaggccaacgccaucaccaccauccugacggcggugaccuucugcuucgccagcggccagaacaucaccgaggaguucuaccaguccacgugcagcgccgucuccaagggguaccucagcgcccugcgcaccggcugguacaccuccgugaucaccaucgagcugagcaacaucaaggagaacaagugcaacgggaccgacgccaaggugaagcucaucaagcaggagcuggacaaguacaagaacgcggucacggagcugcagcuccugaugcaguccacccccgccaccaacaaccgggcccgccgggagcugccgcgcuucaugaacuacacccucaacaacgccaagaagacgaacgugacccugagcaagaagcggaagcgccgguuccugggcuuccuccugggggugggcuccgcgaucgccagcggcgucgccguguccaaggugcugcaccucgagggggaggucaacaagaucaagagcgcccugcuguccaccaacaaggccguggugagccucuccaacggcgucagcgugcugaccuccaaggugcuggaccucaagaacuacaucgacaagcagcugcugcccaucgucaacaagcagagcugcuccaucagcaacaucgagacggugaucgaguuccagcagaagaacaaccgccuccuggagaucacccgggaguucagcgugaacgcgggggucaccacccccguguccacguacaugcugaccaacagcgagcuccugucccugaucaacgacaugcccaucaccaacgaccagaagaagcucaugagcaacaacgugcagaucguccgccagcaguccuacagcaucauguccaucaucaaggaggaggugcuggccuacgugguccagcugccgcucuacggcgugaucgacacccccugcuggaagcugcacacgagcccccugugcaccaccaacaccaaggagggguccaacaucugccucacgcggaccgaccgcggcugguacugcgacaacgccggcagcgucuccuucuucccccaggccgagaccugcaaggugcagagcaaccggguguucugcgacaccaugaacucccugacgcugccgagcgaggucaaccucugcaacguggacaucuucaaccccaaguacgacugcaagaucaugaccuccaagaccgacgugagcuccagcgucaucaccucccugggggccaucgugagcugcuacggcaagacgaagugcaccgcgagcaacaagaaccgcgggaucaucaagaccuucuccaacggcugcgacuacgugagcaacaagggcgucgacaccguguccguggggaacacccuguacuacgucaacaagcaggagggcaagagccucuacgugaagggggagcccaucaucaacuucuacgacccccugguguucccguccgacgaguucgacgccagcaucucccaggucaacgagaagaucaaccagagccuggccuucauccggaaguccgacgagcugcuccacaacgugaacgccggcaagagcacgaccaacaucaugaucaccaccaucaucaucgugaucaucgucauccugcugucccucaucgccguggggcugcugcucuacugcaaggcgcgcuga

SEQ ID NO: 21365 - RNA, 1725 nt, Artificial Sequence
  derived and/or modified CDS sequence (opt1) from HRSV(A2)__F0_DSCav1
auggagcugcucauccugaaggccaacgccaucaccaccauccugacggcggugaccuucugcuucgccagcggccagaacaucaccgaggaguucuaccaguccacgugcagcgccgucuccaagggguaccucagcgcccugcgcaccggcugguacaccuccgugaucaccaucgagcugagcaacaucaaggagaacaagugcaacgggaccgacgccaaggugaagcucaucaagcaggagcuggacaaguacaagaacgcggucacggagcugcagcuccugaugcaguccacccccgccaccaacaaccgggcccgccgggagcugccgcgcuucaugaacuacacccucaacaacgccaagaagacgaacgugacccugagcaagaagcggaagcgccgguuccugggcuuccuccugggggugggcuccgcgaucgccagcggcgucgccgugugcaaggugcugcaccucgagggggaggucaacaagaucaaguccgcccugcugagcaccaacaaggccguggugucccucagcaacggcgucuccgugcugaccuucaaggugcuggaccucaagaacuacaucgacaagcagcugcugcccauccucaacaagcagagcugcuccaucagcaacaucgagacggucaucgaguuccagcagaagaacaaccgccugcuggagaucacccgggaguucuccgugaacgcgggggugaccacccccgucagcacguacaugcucaccaacagcgagcugcugucccucaucaacgacaugcccaucaccaacgaccagaagaagcugaugagcaacaacgugcagaucgugcgccagcaguccuacagcaucaugugcaucaucaaggaggagguccuggccuacguggugcagcucccgcuguacggcgucaucgacacccccugcuggaagcugcacacgagcccccucugcaccaccaacaccaaggaggggagcaacaucugccugacgcggaccgaccgcggcugguacugcgacaacgccggcuccgugagcuucuucccccaggccgagaccugcaagguccaguccaaccggguguucugcgacaccaugaacagccugacgcucccguccgaggugaaccugugcaacgucgacaucuucaaccccaaguacgacugcaagaucaugaccagcaagaccgacguguccagcuccgugaucaccagccugggggccaucgucuccugcuacggcaagacgaagugcaccgcgagcaacaagaaccgcgggaucaucaagaccuucuccaacggcugcgacuacgugagcaacaagggcguggacaccgucagcguggggaacacccucuacuacgugaacaagcaggagggcaagucccuguacgucaagggggagcccaucaucaacuucuacgacccccugguguucccgagcgacgaguucgacgccuccaucagccaggugaacgagaagaucaaccagucccuggccuucauccggaaguccgacgagcuccugcacaacgucaacgccggcaaguccacgaccaacaucaugaucaccaccaucaucaucgugaucaucgugauccugcucagccugaucgccgucgggcugcuccuguacugcaaggcgcgcuccacgcccgugacccugagcaaggaccagcucuccggcaucaacaacaucgccuucagcaacuga

SEQ ID NO: 21366 - RNA, 1662 nt, Artificial Sequence
  derived and/or modified CDS sequence (opt1) from HRSV(A2)__F-del_DSCav1
auggagcugcucauccugaaggccaacgccaucaccaccauccugacggcggugaccuucugcuucgccagcggccagaacaucaccgaggaguucuaccaguccacgugcagcgccgucuccaagggguaccucagcgcccugcgcaccggcugguacaccuccgugaucaccaucgagcugagcaacaucaaggagaacaagugcaacgggaccgacgccaaggugaagcucaucaagcaggagcuggacaaguacaagaacgcggucacggagcugcagcuccugaugcaguccacccccgccaccaacaaccgggcccgccgggagcugccgcgcuucaugaacuacacccucaacaacgccaagaagacgaacgugacccugagcaagaagcggaagcgccgguuccugggcuuccuccugggggugggcuccgcgaucgccagcggcgucgccgugugcaaggugcugcaccucgagggggaggucaacaagaucaaguccgcccugcugagcaccaacaaggccguggugucccucagcaacggcgucuccgugcugaccuucaaggugcuggaccucaagaacuacaucgacaagcagcugcugcccauccucaacaagcagagcugcuccaucagcaacaucgagacggucaucgaguuccagcagaagaacaaccgccugcuggagaucacccgggaguucuccgugaacgcgggggugaccacccccgucagcacguacaugcucaccaacagcgagcugcugucccucaucaacgacaugcccaucaccaacgaccagaagaagcugaugagcaacaacgugcagaucgugcgccagcaguccuacagcaucaugugcaucaucaaggaggagguccuggccuacguggugcagcucccgcuguacggcgucaucgacacccccugcuggaagcugcacacgagcccccucugcaccaccaacaccaaggaggggagcaacaucugccugacgcggaccgaccgcggcugguacugcgacaacgccggcuccgugagcuucuucccccaggccgagaccugcaagguccaguccaaccggguguucugcgacaccaugaacagccugacgcucccguccgaggugaaccugugcaacgucgacaucuucaaccccaaguacgacugcaagaucaugaccagcaagaccgacguguccagcuccgugaucaccagccugggggccaucgucuccugcuacggcaagacgaagugcaccgcgagcaacaagaaccgcgggaucaucaagaccuucuccaacggcugcgacuacgugagcaacaagggcguggacaccgucagcguggggaacacccucuacuacgugaacaagcaggagggcaagucccuguacgucaagggggagcccaucaucaacuucuacgacccccugguguucccgagcgacgaguucgacgccuccaucagccaggugaacgagaagaucaaccagucccuggccuucauccggaaguccgacgagcuccugcacaacgucaacgccggcaaguccacgaccaacaucaugaucaccaccaucaucaucgugaucaucgugauccugcucagccugaucgccgucgggcugcuccuguacugcaaggcgcgcuga

SEQ ID NO: 21367 - RNA, 1608 nt, Artificial Sequence
  derived and/or modified CDS sequence (opt1) from HRSV(A2)__F_DSCav1_mut0
auggagcugcucauccugaaggccaacgccaucaccaccauccugacggcggugaccuucugcuucgccagcggccagaacaucaccgaggaguucuaccaguccacgugcagcgccgucuccaagggguaccucagcgcccugcgcaccggcugguacaccuccgugaucaccaucgagcugagcaacaucaaggagaacaagugcaacgggaccgacgccaaggugaagcucaucaagcaggagcuggacaaguacaagaacgcggucacggagcugcagcuccugaugcaguccacccccgccaccggcagcggguccgccaucgccagcggcguggcggugugcaagguccugcaccucgagggcgaggugaacaagaucaaguccgcccugcugagcaccaacaaggccguggucucccucagcaacgggguguccgugcugacguucaagguccuggaccucaagaacuacaucgacaagcagcugcugccgauccucaacaagcagagcugcuccaucagcaacaucgagaccgugaucgaguuccagcagaagaacaaccggcugcuggagaucacccgcgaguucuccgugaacgccggcgucaccacgcccgugagcaccuacaugcucaccaacagcgagcugcugucccucaucaacgacaugcccaucaccaacgaccagaagaagcugaugagcaacaacgugcagaucguccggcagcaguccuacagcaucaugugcaucaucaaggaggaggugcuggccuacgugguccagcucccccuguacggggugaucgacacgccgugcuggaagcugcacaccagcccccucugcaccaccaacacgaaggagggcagcaacaucugccugacccgcaccgaccgggggugguacugcgacaacgcgggcuccgugagcuucuucccccaggccgagaccugcaagguccaguccaaccgcguguucugcgacacgaugaacagccggacccugcccuccgaggucaaccucugcaacguggacaucuucaacccgaaguacgacugcaagaucaugaccagcaagaccgacguguccagcuccgucaucacgagccugggcgccaucguguccugcuacgggaagaccaagugcaccgccagcaacaagaaccgcggcaucaucaagaccuucuccaacgggugcgacuacgugagcaacaagggcgucgacacggugagcgugggcaacacccuguacuacgucaacaagcaggaggggaagucccucuacgugaagggcgagcccaucaucaacuucuacgacccccugguguuccccagcgacgaguucgacgccuccaucagccaggucaacgagaagaucaaccagucccuggcguucauccggaaguccgacgagcuccugcacaacgugaacgccgggaaguccaccaccaacaucaugaucaccacgaucaucaucgugaucaucgucauccugcucagccugaucgccgugggccugcugcucuacugcaaggcccgcuccaccccggugacccugagcaaggaccagcuguccgggaucaacaacaucgccuucagcaacuga

SEQ ID NO: 21368 - RNA, 1545 nt, Artificial Sequence
  derived and/or modified CDS sequence (opt1) from HRSV(A2)__F-del_DSCav1_mut0
auggagcugcucauccugaaggccaacgccaucaccaccauccugacggcggugaccuucugcuucgccagcggccagaacaucaccgaggaguucuaccaguccacgugcagcgccgucuccaagggguaccucagcgcccugcgcaccggcugguacaccuccgugaucaccaucgagcugagcaacaucaaggagaacaagugcaacgggaccgacgccaaggugaagcucaucaagcaggagcuggacaaguacaagaacgcggucacggagcugcagcuccugaugcaguccacccccgccaccggcagcggguccgccaucgccagcggcguggcggugugcaagguccugcaccucgagggcgaggugaacaagaucaaguccgcccugcugagcaccaacaaggccguggucucccucagcaacgggguguccgugcugacguucaagguccuggaccucaagaacuacaucgacaagcagcugcugccgauccucaacaagcagagcugcuccaucagcaacaucgagaccgugaucgaguuccagcagaagaacaaccggcugcuggagaucacccgcgaguucuccgugaacgccggcgucaccacgcccgugagcaccuacaugcucaccaacagcgagcugcugucccucaucaacgacaugcccaucaccaacgaccagaagaagcugaugagcaacaacgugcagaucguccggcagcaguccuacagcaucaugugcaucaucaaggaggaggugcuggccuacgugguccagcucccccuguacggggugaucgacacgccgugcuggaagcugcacaccagcccccucugcaccaccaacacgaaggagggcagcaacaucugccugacccgcaccgaccgggggugguacugcgacaacgcgggcuccgugagcuucuucccccaggccgagaccugcaagguccaguccaaccgcguguucugcgacacgaugaacagccggacccugcccuccgaggucaaccucugcaacguggacaucuucaacccgaaguacgacugcaagaucaugaccagcaagaccgacguguccagcuccgucaucacgagccugggcgccaucguguccugcuacgggaagaccaagugcaccgccagcaacaagaaccgcggcaucaucaagaccuucuccaacgggugcgacuacgugagcaacaagggcgucgacacggugagcgugggcaacacccuguacuacgucaacaagcaggaggggaagucccucuacgugaagggcgagcccaucaucaacuucuacgacccccugguguuccccagcgacgaguucgacgccuccaucagccaggucaacgagaagaucaaccagucccuggcguucauccggaaguccgacgagcuccugcacaacgugaacgccgggaaguccaccaccaacaucaugaucaccacgaucaucaucgugaucaucgucauccugcucagccugaucgccgugggccugcugcucuacugcaaggcccgcuga

SEQ ID NO: 21369 - RNA, 1608 nt, Artificial Sequence
  derived and/or modified CDS sequence (opt1) from HRSV(A2)__F_DSCav1_mut1
auggagcugcucauccugaaggccaacgccaucaccaccauccugacggcggugaccuucugcuucgccagcggccagaacaucaccgaggaguucuaccaguccacgugcagcgccgucuccaagggguaccucggcgcccugcgcaccgggugguacaccagcgugaucaccaucgagcuguccaacaucaaggagaacaagugcaacggcaccgacgccaaggugaagcucaucaagcaggagcuggacaaguacaagaacgcggucacggagcugcagcuccugaugcagagcacccccgccaccggguccggcagcgccaucugcuccggcguggccgugugcaagguccugcaccucgagggggaggugaacaagaucaagagcgcgcugcuguccaccaacaaggccguggucagccucuccaacggcgugagcgugcugacguucaagguccuggaccucaagaacuacaucgacaagcagcugcugccgauccucaacaagcaguccugcagcauccccaacaucgagaccgugaucgaguuccagcagaagaacaaccggcugcuggagaucacccgcgaguucuccgugaacgccggggucaccacgcccgugagcaccuacaugcucaccaacuccgagcugcugagccucaucaacgacaugcccaucaccaacgaccagaagaagcugaugagcaacaacgugcagaucguccggcagcaguccuacagcaucaugugcaucaucaaggaggaggugcuggccuacgugguccagcucccgcuguacggcgugaucgacacgcccugcuggaagcugcacaccagcccccucugcaccaccaacacgaaggagggguccaacaucugccugacccgcaccgaccggggcugguacugcgacaacgccggcuccgugagcuucuucccccaggcggagaccugcaagguccaguccaaccgcguguucugcgacacgaugaacagccugacccucccguccgaggucaaccugugcaacguggacaucuucaaccccaaguacgacugcaagaucaugaccagcaagaccgacguguccagcuccgucaucacgagccugggggccaucguguccugcuacggcaagaccaagugcaccgccagcaacaagaaccgggggaucaucaagaccuucuccaacggcugcgacuacgugagcaacaagggcgucgacacgguguccguggggaacacccucuacugcgucaacaagcaggagggccagagccuguacgugaagggggagcccaucaucaacuucuacgacccccugguguucccgagcgacgaguucgacgccuccaucagccaggucaacgagaagaucaaccagucccucgccuucauccgcaagagcgacgagcugcugcacaacgugaacgcgggcaaguccaccaccaacaucaugaucaccacgaucaucaucgugaucaucgucauccuccugagccugaucgccguggggcugcuccuguacugcaaggcccgguccacccccgugacccugagcaaggaccagcucuccggcaucaacaacaucgccuucagcaacuga

SEQ ID NO: 21370 - RNA, 1545 nt, Artificial Sequence
  derived and/or modified CDS sequence (opt1) from HRSV(A2)__F-del_DSCav1_mut1
auggagcugcucauccugaaggccaacgccaucaccaccauccugacggcggugaccuucugcuucgccagcggccagaacaucaccgaggaguucuaccaguccacgugcagcgccgucuccaagggguaccucggcgcccugcgcaccgggugguacaccagcgugaucaccaucgagcuguccaacaucaaggagaacaagugcaacggcaccgacgccaaggugaagcucaucaagcaggagcuggacaaguacaagaacgcggucacggagcugcagcuccugaugcagagcacccccgccaccggguccggcagcgccaucugcuccggcguggccgugugcaagguccugcaccucgagggggaggugaacaagaucaagagcgcgcugcuguccaccaacaaggccguggucagccucuccaacggcgugagcgugcugacguucaagguccuggaccucaagaacuacaucgacaagcagcugcugccgauccucaacaagcaguccugcagcauccccaacaucgagaccgugaucgaguuccagcagaagaacaaccggcugcuggagaucacccgcgaguucuccgugaacgccggggucaccacgcccgugagcaccuacaugcucaccaacuccgagcugcugagccucaucaacgacaugcccaucaccaacgaccagaagaagcugaugagcaacaacgugcagaucguccggcagcaguccuacagcaucaugugcaucaucaaggaggaggugcuggccuacgugguccagcucccgcuguacggcgugaucgacacgcccugcuggaagcugcacaccagcccccucugcaccaccaacacgaaggagggguccaacaucugccugacccgcaccgaccggggcugguacugcgacaacgccggcuccgugagcuucuucccccaggcggagaccugcaagguccaguccaaccgcguguucugcgacacgaugaacagccugacccucccguccgaggucaaccugugcaacguggacaucuucaaccccaaguacgacugcaagaucaugaccagcaagaccgacguguccagcuccgucaucacgagccugggggccaucguguccugcuacggcaagaccaagugcaccgccagcaacaagaaccgggggaucaucaagaccuucuccaacggcugcgacuacgugagcaacaagggcgucgacacgguguccguggggaacacccucuacugcgucaacaagcaggagggccagagccuguacgugaagggggagcccaucaucaacuucuacgacccccugguguucccgagcgacgaguucgacgccuccaucagccaggucaacgagaagaucaaccagucccucgccuucauccgcaagagcgacgagcugcugcacaacgugaacgcgggcaaguccaccaccaacaucaugaucaccacgaucaucaucgugaucaucgucauccuccugagccugaucgccguggggcugcuccuguacugcaaggcccgguga

SEQ ID NO: 21371 - RNA, 1608 nt, Artificial Sequence
  derived and/or modified CDS sequence (opt1) from HRSV(A2)__F_DSCav1_mut2
auggagcugcucauccugaaggccaacgccaucaccaccauccugacggcggugaccuucugcuucgccagcggccagaacaucaccgaggaguucuaccaguccacgugcagcgccgucuccaagggguaccucggcgcccugcgcaccgggugguacaccagcgugaucaccaucgagcuguccaacaucaaggagaacaagugcaacggcaccgacgccaaggugaagcucaucaagcaggagcuggacaaguacaagaacgcggucacggaccugcagcuccugaugcagagcacccccgccaccggguccggcagcgccaucugcuccggcguggccgugugcaagguccugcaccucgagggggaggugaacaagaucaagagcgcgcugcuguccaccaacaaggccguggucagccucuccaacggcgugagcgugcugacguucaagguccuggaccucaagaacuacaucgacaagcagcugcugccgauccucaacaagcaguccugcagcauccccaacaucgagaccgugaucgaguuccagcagaagaacaaccggcugcuggagaucacccgcgaguucuccgugaacgccggggucaccacgcccgugagcaccuacaugcucaccaacuccgagcugcugagccucaucaacgacaugcccaucaccaacgaccagaagaagcugaugagcaacaacgugcagaucguccggcagcaguccuacagcaucaugugcaucaucaaggaggaggugcuggccuacgugguccagcucccgcuguacggcgugaucgacacgcccugcuggaagcugcacaccagcccccucugcaccaccaacacgaaggagggguccaacaucugccugacccgcaccgaccggggcugguacugcgacaacgccggcuccgugagcuucuucccccaggcggagaccugcaagguccaguccaaccgcguguucugcgacacgaugaacagccugacccucccguccgaggucaaccugugcaacguggacaucuucaaccccaaguacgacugcaagaucaugaccagcaagaccgacguguccagcuccgucaucacgagccugggggccaucguguccugcuacggcaagaccaagugcaccgccagcaacaagaaccgggggaucaucaagaccuucuccaacggcugcgacuacgugagcaacaagggcgucgacacgguguccguggggaacacccucuacugcgucaacaagcaggagggccagagccuguacgugaagggggagcccaucaucaacuucuacgacccccugguguucccgagcgacgaguucgacgccuccaucagccaggucaacgagaagaucaaccagucccucgccuucauccgcaagagcgacgagcugcugcacaacgugaacgcgggcaaguccaccaccaacaucaugaucaccacgaucaucaucgugaucaucgucauccuccugagccugaucgccguggggcugcuccuguacugcaaggcccgguccacccccgugacccugagcaaggaccagcucuccggcaucaacaacaucgccuucagcaacuga

SEQ ID NO: 21372 - RNA, 1545 nt, Artificial Sequence
  derived and/or modified CDS sequence (opt1) from HRSV(A2)__F-del_DSCav1_mut2
auggagcugcucauccugaaggccaacgccaucaccaccauccugacggcggugaccuucugcuucgccagcggccagaacaucaccgaggaguucuaccaguccacgugcagcgccgucuccaagggguaccucggcgcccugcgcaccgggugguacaccagcgugaucaccaucgagcuguccaacaucaaggagaacaagugcaacggcaccgacgccaaggugaagcucaucaagcaggagcuggacaaguacaagaacgcggucacggaccugcagcuccugaugcagagcacccccgccaccggguccggcagcgccaucugcuccggcguggccgugugcaagguccugcaccucgagggggaggugaacaagaucaagagcgcgcugcuguccaccaacaaggccguggucagccucuccaacggcgugagcgugcugacguucaagguccuggaccucaagaacuacaucgacaagcagcugcugccgauccucaacaagcaguccugcagcauccccaacaucgagaccgugaucgaguuccagcagaagaacaaccggcugcuggagaucacccgcgaguucuccgugaacgccggggucaccacgcccgugagcaccuacaugcucaccaacuccgagcugcugagccucaucaacgacaugcccaucaccaacgaccagaagaagcugaugagcaacaacgugcagaucguccggcagcaguccuacagcaucaugugcaucaucaaggaggaggugcuggccuacgugguccagcucccgcuguacggcgugaucgacacgcccugcuggaagcugcacaccagcccccucugcaccaccaacacgaaggagggguccaacaucugccugacccgcaccgaccggggcugguacugcgacaacgccggcuccgugagcuucuucccccaggcggagaccugcaagguccaguccaaccgcguguucugcgacacgaugaacagccugacccucccguccgaggucaaccugugcaacguggacaucuucaaccccaaguacgacugcaagaucaugaccagcaagaccgacguguccagcuccgucaucacgagccugggggccaucguguccugcuacggcaagaccaagugcaccgccagcaacaagaaccgggggaucaucaagaccuucuccaacggcugcgacuacgugagcaacaagggcgucgacacgguguccguggggaacacccucuacugcgucaacaagcaggagggccagagccuguacgugaagggggagcccaucaucaacuucuacgacccccugguguucccgagcgacgaguucgacgccuccaucagccaggucaacgagaagaucaaccagucccucgccuucauccgcaagagcgacgagcugcugcacaacgugaacgcgggcaaguccaccaccaacaucaugaucaccacgaucaucaucgugaucaucgucauccuccugagccugaucgccguggggcugcuccuguacugcaaggcccgguga

SEQ ID NO: 21373 - RNA, 1608 nt, Artificial Sequence
  derived and/or modified CDS sequence (opt1) from HRSV(A2)__F_DSCav1_mut3
auggagcugcucauccugaaggccaacgccaucaccaccauccugacggcggugaccuucugcuucgccagcggccagaacaucaccgaggaguucuaccaguccacgugcagcgccgucuccaagggguaccucggcgcccugcgcaccgggugguacaccagcgugaucaccaucgagcuguccaacaucaaggagaucaagugcaacggcaccgacgccaaggugaagcucaucaagcaggagcuggacaaguacaagaacgcggucacggaccugcagcuccugaugcagagcacccccgccaccggguccggcagcgccaucugcuccggcguggccgugugcaagguccugcaccucgagggggaggugaacaagaucaagagcgcgcugcuguccaccaacaaggccguggucagccucuccaacggcgugagcgugcugacguucaagguccuggaccucaagaacuacaucgacaagcagcugcugccgauccucaacaagcaguccugcagcauccccaacaucgagaccgugaucgaguuccagcagaagaacaaccggcugcuggagaucacccgcgaguucuccgugaacgccggggucaccacgcccgugagcaccuacaugcucaccaacuccgagcugcugagccucaucaacgacaugcccaucaccaacgaccagaagaagcugaugagcaacaacgugcagaucguccggcagcaguccuacagcaucaugugcaucaucaaggaggaggugcuggccuacgugguccagcucccgcuguacggcgugaucgacacgcccugcuggaagcugcacaccagcccccucugcaccaccaacacgaaggagggguccaacaucugccugacccgcaccgaccggggcugguacugcgacaacgccggcuccgugagcuucuucccccaggcggagaccugcaagguccaguccaaccgcguguucugcgacacgaugaacagccugacccucccguccgaggucaaccugugcaacguggacaucuucaaccccaaguacgacugcaagaucaugaccagcaagaccgacguguccagcuccgucaucacgagccugggggccaucguguccugcuacggcaagaccaagugcaccgccagcaacaagaaccgggggaucaucaagaccuucuccaacggcugcgacuacgugagcaacaagggcgucgacacgguguccguggggaacacccucuacugcgucaacaagcaggagggccagagccuguacgugaagggggagcccaucaucaacuucuacgacccccugguguucccgagcgacgaguucgacgccuccaucagccaggucaacgagaagaucaaccagucccucgccuucauccgcaagagcgacgagcugcugcacaacgugaacgcgggcaaguccaccaccaacaucaugaucaccacgaucaucaucgugaucaucgucauccuccugagccugaucgccguggggcugcuccuguacugcaaggcccgguccacccccgugacccugagcaaggaccagcucuccggcaucaacaacaucgccuucagcaacuga

SEQ ID NO: 21374 - RNA, 1545 nt, Artificial Sequence
  derived and/or modified CDS sequence (opt1) from HRSV(A2)__F-del_DSCav1_mut3
auggagcugcucauccugaaggccaacgccaucaccaccauccugacggcggugaccuucugcuucgccagcggccagaacaucaccgaggaguucuaccaguccacgugcagcgccgucuccaagggguaccucggcgcccugcgcaccgggugguacaccagcgugaucaccaucgagcuguccaacaucaaggagaucaagugcaacggcaccgacgccaaggugaagcucaucaagcaggagcuggacaaguacaagaacgcggucacggaccugcagcuccugaugcagagcacccccgccaccggguccggcagcgccaucugcuccggcguggccgugugcaagguccugcaccucgagggggaggugaacaagaucaagagcgcgcugcuguccaccaacaaggccguggucagccucuccaacggcgugagcgugcugacguucaagguccuggaccucaagaacuacaucgacaagcagcugcugccgauccucaacaagcaguccugcagcauccccaacaucgagaccgugaucgaguuccagcagaagaacaaccggcugcuggagaucacccgcgaguucuccgugaacgccggggucaccacgcccgugagcaccuacaugcucaccaacuccgagcugcugagccucaucaacgacaugcccaucaccaacgaccagaagaagcugaugagcaacaacgugcagaucguccggcagcaguccuacagcaucaugugcaucaucaaggaggaggugcuggccuacgugguccagcucccgcuguacggcgugaucgacacgcccugcuggaagcugcacaccagcccccucugcaccaccaacacgaaggagggguccaacaucugccugacccgcaccgaccggggcugguacugcgacaacgccggcuccgugagcuucuucccccaggcggagaccugcaagguccaguccaaccgcguguucugcgacacgaugaacagccugacccucccguccgaggucaaccugugcaacguggacaucuucaaccccaaguacgacugcaagaucaugaccagcaagaccgacguguccagcuccgucaucacgagccugggggccaucguguccugcuacggcaagaccaagugcaccgccagcaacaagaaccgggggaucaucaagaccuucuccaacggcugcgacuacgugagcaacaagggcgucgacacgguguccguggggaacacccucuacugcgucaacaagcaggagggccagagccuguacgugaagggggagcccaucaucaacuucuacgacccccugguguucccgagcgacgaguucgacgccuccaucagccaggucaacgagaagaucaaccagucccucgccuucauccgcaagagcgacgagcugcugcacaacgugaacgcgggcaaguccaccaccaacaucaugaucaccacgaucaucaucgugaucaucgucauccuccugagccugaucgccguggggcugcuccuguacugcaaggcccgguga

SEQ ID NO: 21375 - RNA, 1608 nt, Artificial Sequence
  derived and/or modified CDS sequence (opt1) from HRSV(A2)__F_DSCav1_mut4
auggagcugcucauccugaaggccaacgccaucaccaccauccugacggcggugaccuucugcuucgccagcggccagaacaucaccgaggaguucuaccaguccacgugcagcgccgucuccaagggguaccucagcgcccugcgcaccggcugguacaccuccgugaucaccaucgagcugagcaacaucaaggagaacaagugcaacgggaccgacgccaaggugaagcucaucaagcaggagcuggacaaguacaagaacgcggucacggagcugcagcuccugaugcaguccacccccgccaccggcagcggguccgccaucugcagcggcguggccgugugcaagguccugcaccucgagggcgaggugaacaagaucaaguccgcgcugcugagcaccaacaaggccguggucucccucagcaacgggguguccgugcugacguucaagguccuggaccucaagaacuacaucgacaagcagcugcugccgauccucaacaagcagagcugcuccaucagcaacaucgagaccgugaucgaguuccagcagaagaacaaccggcugcuggagaucacccgcgaguucuccgugaacgccggcgucaccacgcccgugagcaccuacaugcucaccaacagcgagcugcugucccucaucaacgacaugcccaucaccaacgaccagaagaagcugaugagcaacaacgugcagaucguccggcagcaguccuacagcaucaugugcaucaucaaggaggaggugcuggccuacgugguccagcucccccuguacggggugaucgacacgccgugcuggaagcugcacaccagcccccucugcaccaccaacacgaaggagggcagcaacaucugccugacccgcaccgaccgggggugguacugcgacaacgccggcuccgugagcuucuucccccaggcggagaccugcaagguccaguccaaccgcguguucugcgacacgaugaacagccggacccugcccuccgaggucaaccucugcaacguggacaucuucaacccgaaguacgacugcaagaucaugaccagcaagaccgacguguccagcuccgucaucacgagccugggcgccaucguguccugcuacgggaagaccaagugcaccgccagcaacaagaaccgcggcaucaucaagaccuucuccaacgggugcgacuacgugagcaacaagggcgucgacacggugagcgugggcaacacccuguacugcgucaacaagcaggaggggaagucccucuacgugaagggcgagcccaucaucaacuucuacgacccccugguguuccccagcgacgaguucgacgccuccaucagccaggucaacgagaagaucaaccagucccuggccuucauccggaaguccgacgagcuccugcacaacgugaacgcggggaaguccaccaccaacaucaugaucaccacgaucaucaucgugaucaucgucauccugcucagccugaucgccgugggccugcugcucuacugcaaggcccgcuccaccccggugacccugagcaaggaccagcuguccgggaucaacaacaucgccuucagcaacuga

SEQ ID NO: 21376 - RNA, 1545 nt, Artificial Sequence
  derived and/or modified CDS sequence (opt1) from HRSV(A2)__F-del_DSCav1_mut4
auggagcugcucauccugaaggccaacgccaucaccaccauccugacggcggugaccuucugcuucgccagcggccagaacaucaccgaggaguucuaccaguccacgugcagcgccgucuccaagggguaccucagcgcccugcgcaccggcugguacaccuccgugaucaccaucgagcugagcaacaucaaggagaacaagugcaacgggaccgacgccaaggugaagcucaucaagcaggagcuggacaaguacaagaacgcggucacggagcugcagcuccugaugcaguccacccccgccaccggcagcggguccgccaucugcagcggcguggccgugugcaagguccugcaccucgagggcgaggugaacaagaucaaguccgcgcugcugagcaccaacaaggccguggucucccucagcaacgggguguccgugcugacguucaagguccuggaccucaagaacuacaucgacaagcagcugcugccgauccucaacaagcagagcugcuccaucagcaacaucgagaccgugaucgaguuccagcagaagaacaaccggcugcuggagaucacccgcgaguucuccgugaacgccggcgucaccacgcccgugagcaccuacaugcucaccaacagcgagcugcugucccucaucaacgacaugcccaucaccaacgaccagaagaagcugaugagcaacaacgugcagaucguccggcagcaguccuacagcaucaugugcaucaucaaggaggaggugcuggccuacgugguccagcucccccuguacggggugaucgacacgccgugcuggaagcugcacaccagcccccucugcaccaccaacacgaaggagggcagcaacaucugccugacccgcaccgaccgggggugguacugcgacaacgccggcuccgugagcuucuucccccaggcggagaccugcaagguccaguccaaccgcguguucugcgacacgaugaacagccggacccugcccuccgaggucaaccucugcaacguggacaucuucaacccgaaguacgacugcaagaucaugaccagcaagaccgacguguccagcuccgucaucacgagccugggcgccaucguguccugcuacgggaagaccaagugcaccgccagcaacaagaaccgcggcaucaucaagaccuucuccaacgggugcgacuacgugagcaacaagggcgucgacacggugagcgugggcaacacccuguacugcgucaacaagcaggaggggaagucccucuacgugaagggcgagcccaucaucaacuucuacgacccccugguguuccccagcgacgaguucgacgccuccaucagccaggucaacgagaagaucaaccagucccuggccuucauccggaaguccgacgagcuccugcacaacgugaacgcggggaaguccaccaccaacaucaugaucaccacgaucaucaucgugaucaucgucauccugcucagccugaucgccgugggccugcugcucuacugcaaggcccgcuga

SEQ ID NO: 21377 - RNA, 1611 nt, Artificial Sequence
  derived and/or modified CDS sequence (opt1) from HRSV(A2)__F_DSCav1_mut5
auggagcugcucauccugaaggccaacgccaucaccaccauccugacggcggugaccuucugcuucgccagcggccagaacaucaccgaggaguucuaccaguccacgugcagcgccgucuccaagggguaccucagcgcccugcgcaccggcugguacaccuccgugaucaccaucgagcugagcaacaucaaggagaacaagugcaacgggaccgacgccaaggugaagcucaucaagcaggagcuggacaaguacaagaacgcggucacggagcugcagcuccugaugcaguccacccccgccaccggcagcggguccgccaucgccagcggcguggcggugugcaagguccugcaccucgagggcgaggugaacaagaucaaguccgcccugcugagcaccaacaaggccguggucucccucagcgggugcggcguguccgugcugacguucaagguccuggaccucaagaacuacaucgacaagcagcugcugccgauccucaacaagcagagcugcuccaucagcaacaucgagaccgugaucgaguuccagcagaagaacaaccggcugcuggagaucacccgcgaguucuccgugaacgccggggucaccacgcccgugagcaccuacaugcucaccaacagcgagcugcugucccucaucaacgacaugcccaucaccaacgaccagaagaagcugaugagcaacaacgugcagaucguccggcagcaguccuacagcaucaugugcaucaucaaggaggaggugcuggccuacgugguccagcucccccuguacggcgugaucgacacgccgugcuggaagcugcacaccagcccccucugcaccaccaacacgaaggaggggagcaacaucugccugacccgcaccgaccggggcugguacugcgacaacgcgggcuccgugagcuucuucccccaggccgagaccugcaagguccaguccaaccgcguguucugcgacacgaugaacagccggacccugcccuccgaggucaaccucugcaacguggacaucuucaacccgaaguacgacugcaagaucaugaccagcaagaccgacguguccagcuccgucaucacgagccugggggccaucguguccugcuacggcaagaccaagugcaccgccagcaacaagugccgcgggaucaucaagaccuucuccaacggcugcgacuacgugagcaacaagggcgucgacacggugagcguggggaacacccuguacuacgucaacaagcaggagggcaagucccucuacgugaagggggagcccaucaucaacuucuacgacccccugguguuccccagcgacgaguucgacgccuccaucagccaggucaacgagaagaucaaccagucccuggcguucauccggaaguccgacgagcuccugcacaacgugaacgccggcaaguccaccaccaacaucaugaucaccacgaucaucaucgugaucaucgucauccugcucagccugaucgccguggggcugcugcucuacugcaaggcccgcuccaccccggugacccugagcaaggaccagcuguccggcaucaacaacaucgccuucagcaacuga

SEQ ID NO: 21378 - RNA, 1548 nt, Artificial Sequence
  derived and/or modified CDS sequence (opt1) from HRSV(A2)__F-del_DSCav1_mut5
auggagcugcucauccugaaggccaacgccaucaccaccauccugacggcggugaccuucugcuucgccagcggccagaacaucaccgaggaguucuaccaguccacgugcagcgccgucuccaagggguaccucagcgcccugcgcaccggcugguacaccuccgugaucaccaucgagcugagcaacaucaaggagaacaagugcaacgggaccgacgccaaggugaagcucaucaagcaggagcuggacaaguacaagaacgcggucacggagcugcagcuccugaugcaguccacccccgccaccggcagcggguccgccaucgccagcggcguggcggugugcaagguccugcaccucgagggcgaggugaacaagaucaaguccgcccugcugagcaccaacaaggccguggucucccucagcgggugcggcguguccgugcugacguucaagguccuggaccucaagaacuacaucgacaagcagcugcugccgauccucaacaagcagagcugcuccaucagcaacaucgagaccgugaucgaguuccagcagaagaacaaccggcugcuggagaucacccgcgaguucuccgugaacgccggggucaccacgcccgugagcaccuacaugcucaccaacagcgagcugcugucccucaucaacgacaugcccaucaccaacgaccagaagaagcugaugagcaacaacgugcagaucguccggcagcaguccuacagcaucaugugcaucaucaaggaggaggugcuggccuacgugguccagcucccccuguacggcgugaucgacacgccgugcuggaagcugcacaccagcccccucugcaccaccaacacgaaggaggggagcaacaucugccugacccgcaccgaccggggcugguacugcgacaacgcgggcuccgugagcuucuucccccaggccgagaccugcaagguccaguccaaccgcguguucugcgacacgaugaacagccggacccugcccuccgaggucaaccucugcaacguggacaucuucaacccgaaguacgacugcaagaucaugaccagcaagaccgacguguccagcuccgucaucacgagccugggggccaucguguccugcuacggcaagaccaagugcaccgccagcaacaagugccgcgggaucaucaagaccuucuccaacggcugcgacuacgugagcaacaagggcgucgacacggugagcguggggaacacccuguacuacgucaacaagcaggagggcaagucccucuacgugaagggggagcccaucaucaacuucuacgacccccugguguuccccagcgacgaguucgacgccuccaucagccaggucaacgagaagaucaaccagucccuggcguucauccggaaguccgacgagcuccugcacaacgugaacgccggcaaguccaccaccaacaucaugaucaccacgaucaucaucgugaucaucgucauccugcucagccugaucgccguggggcugcugcucuacugcaaggcccgcuga

SEQ ID NO: 21379 - RNA, 1608 nt, Artificial Sequence
  derived and/or modified CDS sequence (opt1) from HRSV(A2)__F_DSCav1_mut6
auggagcugcucauccugaaggccaacgccaucaccaccauccugacggcggugaccuucugcuucgccagcggccagaacaucaccgaggaguucuaccaguccacgugcagcgccgucuccaagggguaccucggcgcccugcgcaccgggugguacaccagcgugaucaccaucgagcuguccaacaucaaggagaacaagugcaacggcaccgacgccaaggugaagcucaucaagcaggagcuggacaaguacaagaacgcggucacggaccugcagaugcucaugugcagcacccccgccaccggguccggcagcgccaucgccuccggcguggcggugugcaagguccugcaccuggagggggaggugaacaagaucaagagcgcccuccuguccaccaacaaggccguggucagccuguccaacggcgugagcgugcucacguucaagguccuggaccugaagaacuacaucgacaagcagcuccugccgauccugaacaagcaguccugcagcauccccaaccccgagaccgugauggaguuccagcagaagaacaaccggcuccuggagaucacccgcgaguucuccgugaacgccggggucaccacgcccgugagcaccuacaugcugaccaacuccgagcuccugagccugaucaacgacaugccgaucaccaacgaccagaagaagcucaugagcaacaacgugcagaucguccggcagcaguccuacagcaucaugugcaucaucaaggaggaggugcuggccuacgugguccagcugccccucuacggcgugaucgacacgcccugcuggaagcugcacaccagcccccugugcaccaccaacacgaaggaggggagcaacaucugccucacccgcaccgaccggggcugguacugcgacaacgcgggcuccgugagcuucuucccgcaggccgagaccugcaaggucugcuccaaccgcguguucugcgacacgaugaacagccugacccugcccuccgaggucaaccucugcaacguggacaucuucaaccccaaguacgacugcaagaucaugaccagcaagaccgacguguccagcuccgucaucacgagccugggggccaucguguccugcuacggcaagaccaagugcaccgccagcaacaagaacaaggggaucaucaagaccuucuccaacggcugcgacuacgugagcaacaagggcgucgacacgguguccguggggaacacccuguacuacgucaacaagcaggagggccagagccucuacgugaagggggagcccaucaucaacuucuacgacccgcugguguuccccagcgacgaguucgacgccuccaucagccaggucaacgagaagaucaaccagucccuggcguucauccggaaguccgacgagcuccugcacaacgugaacgccggcaaguccaccaccaacaucaugaucaccacgaucaucaucgugaucaucgucauccugcucagccugaucgccguggggcugcugcucuacugcaaggcccgcuccacccccgugacccugagcaaggaccagcuguccggcaucaacaacaucgccuucagcaacuga

SEQ ID NO: 21380 - RNA, 1545 nt, Artificial Sequence
  derived and/or modified CDS sequence (opt1) from HRSV(A2)__F-del_DSCav1_mut6
auggagcugcucauccugaaggccaacgccaucaccaccauccugacggcggugaccuucugcuucgccagcggccagaacaucaccgaggaguucuaccaguccacgugcagcgccgucuccaagggguaccucggcgcccugcgcaccgggugguacaccagcgugaucaccaucgagcuguccaacaucaaggagaacaagugcaacggcaccgacgccaaggugaagcucaucaagcaggagcuggacaaguacaagaacgcggucacggaccugcagaugcucaugugcagcacccccgccaccggguccggcagcgccaucgccuccggcguggcggugugcaagguccugcaccuggagggggaggugaacaagaucaagagcgcccuccuguccaccaacaaggccguggucagccuguccaacggcgugagcgugcucacguucaagguccuggaccugaagaacuacaucgacaagcagcuccugccgauccugaacaagcaguccugcagcauccccaaccccgagaccgugauggaguuccagcagaagaacaaccggcuccuggagaucacccgcgaguucuccgugaacgccggggucaccacgcccgugagcaccuacaugcugaccaacuccgagcuccugagccugaucaacgacaugccgaucaccaacgaccagaagaagcucaugagcaacaacgugcagaucguccggcagcaguccuacagcaucaugugcaucaucaaggaggaggugcuggccuacgugguccagcugccccucuacggcgugaucgacacgcccugcuggaagcugcacaccagcccccugugcaccaccaacacgaaggaggggagcaacaucugccucacccgcaccgaccggggcugguacugcgacaacgcgggcuccgugagcuucuucccgcaggccgagaccugcaaggucugcuccaaccgcguguucugcgacacgaugaacagccugacccugcccuccgaggucaaccucugcaacguggacaucuucaaccccaaguacgacugcaagaucaugaccagcaagaccgacguguccagcuccgucaucacgagccugggggccaucguguccugcuacggcaagaccaagugcaccgccagcaacaagaacaaggggaucaucaagaccuucuccaacggcugcgacuacgugagcaacaagggcgucgacacgguguccguggggaacacccuguacuacgucaacaagcaggagggccagagccucuacgugaagggggagcccaucaucaacuucuacgacccgcugguguuccccagcgacgaguucgacgccuccaucagccaggucaacgagaagaucaaccagucccuggcguucauccggaaguccgacgagcuccugcacaacgugaacgccggcaaguccaccaccaacaucaugaucaccacgaucaucaucgugaucaucgucauccugcucagccugaucgccguggggcugcugcucuacugcaaggcccgcuga

SEQ ID NO: 21381 - RNA, 1608 nt, Artificial Sequence
  derived and/or modified CDS sequence (opt1) from HRSV(A2)__F_DSCav1_mut7
auggagcugcucauccugaaggccaacgccaucaccaccauccugacggcggugaccuucugcuucgccagcggccagaacaucaccgaggaguucuaccaguccacgugcagcgccgucuccaagggguaccucagcgcccugcgcaccggcugguacaccuccgugaucaccaucgagcugagcaacaucaaggagaacaagugcaacgggaccgacgccaaggugaagcucaucaagcaggagcuggacaaguacaagaacgcggucacggagcugcagaugcucaugugcuccacccccgccaccggcagcggguccgccaucgccagcggcguggcggugugcaagguccugcaccuggagggcgaggugaacaagaucaaguccgcccuccugagcaccaacaaggccguggucucccugagcaacgggguguccgugcucacguucaagguccuggaccugaagaacuacaucgacaagcagcuccugccgauccugaacaagcagagcugcuccaucagcaacaucgagaccgugauggaguuccagcagaagaacaaccggcuccuggagaucacccgcgaguucuccgugaacgccggcgucaccacgcccgugagcaccuacaugcugaccaacagcgagcuccugucccugaucaacgacaugcccaucaccaacgaccagaagaagcucaugagcaacaacgugcagaucguccggcagcaguccuacagcaucaugugcaucaucaaggaggaggugcuggccuacgugguccagcugccccucuacggggugaucgacacgccgugcuggaagcugcacaccagcccccugugcaccaccaacacgaaggagggcagcaacaucugccucacccgcaccgaccgggggugguacugcgacaacgcgggcuccgugagcuucuucccccaggccgagaccugcaaggucugcuccaaccgcguguucugcgacacgaugaacagccugacccugcccuccgaggucaaccucugcaacguggacaucuucaacccgaaguacgacugcaagaucaugaccagcaagaccgacguguccagcuccgucaucacgagccugggcgccaucguguccugcuacgggaagaccaagugcaccgccagcaacaagaacaagggcaucaucaagaccuucuccaacgggugcgacuacgugagcaacaagggcgucgacacggugagcgugggcaacacccuguacuacgucaacaagcaggaggggaagucccucuacgugaagggcgagcccaucaucaacuucuacgacccccugguguuccccagcgacgaguucgacgccuccaucagccaggucaacgagaagaucaaccagucccuggcguucauccggaaguccgacgagcuccugcacaacgugaacgccgggaaguccaccaccaacaucaugaucaccacgaucaucaucgugaucaucgucauccugcucagccugaucgccgugggccugcugcucuacugcaaggcccgcuccaccccggugacccugagcaaggaccagcuguccgggaucaacaacaucgccuucagcaacuga

SEQ ID NO: 21382 - RNA, 1545 nt, Artificial Sequence
  derived and/or modified CDS sequence (opt1) from HRSV(A2)__F-del_DSCav1_mut7
auggagcugcucauccugaaggccaacgccaucaccaccauccugacggcggugaccuucugcuucgccagcggccagaacaucaccgaggaguucuaccaguccacgugcagcgccgucuccaagggguaccucagcgcccugcgcaccggcugguacaccuccgugaucaccaucgagcugagcaacaucaaggagaacaagugcaacgggaccgacgccaaggugaagcucaucaagcaggagcuggacaaguacaagaacgcggucacggagcugcagaugcucaugugcuccacccccgccaccggcagcggguccgccaucgccagcggcguggcggugugcaagguccugcaccuggagggcgaggugaacaagaucaaguccgcccuccugagcaccaacaaggccguggucucccugagcaacgggguguccgugcucacguucaagguccuggaccugaagaacuacaucgacaagcagcuccugccgauccugaacaagcagagcugcuccaucagcaacaucgagaccgugauggaguuccagcagaagaacaaccggcuccuggagaucacccgcgaguucuccgugaacgccggcgucaccacgcccgugagcaccuacaugcugaccaacagcgagcuccugucccugaucaacgacaugcccaucaccaacgaccagaagaagcucaugagcaacaacgugcagaucguccggcagcaguccuacagcaucaugugcaucaucaaggaggaggugcuggccuacgugguccagcugccccucuacggggugaucgacacgccgugcuggaagcugcacaccagcccccugugcaccaccaacacgaaggagggcagcaacaucugccucacccgcaccgaccgggggugguacugcgacaacgcgggcuccgugagcuucuucccccaggccgagaccugcaaggucugcuccaaccgcguguucugcgacacgaugaacagccugacccugcccuccgaggucaaccucugcaacguggacaucuucaacccgaaguacgacugcaagaucaugaccagcaagaccgacguguccagcuccgucaucacgagccugggcgccaucguguccugcuacgggaagaccaagugcaccgccagcaacaagaacaagggcaucaucaagaccuucuccaacgggugcgacuacgugagcaacaagggcgucgacacggugagcgugggcaacacccuguacuacgucaacaagcaggaggggaagucccucuacgugaagggcgagcccaucaucaacuucuacgacccccugguguuccccagcgacgaguucgacgccuccaucagccaggucaacgagaagaucaaccagucccuggcguucauccggaaguccgacgagcuccugcacaacgugaacgccgggaaguccaccaccaacaucaugaucaccacgaucaucaucgugaucaucgucauccugcucagccugaucgccgugggccugcugcucuacugcaaggcccgcuga

SEQ ID NO: 21383 - RNA, 1611 nt, Artificial Sequence
  derived and/or modified CDS sequence (opt1) from HRSV(A2)__F_DSCav1_mut8
auggagcugcucauccugaaggccaacgccaucaccaccauccugacggcggugaccuucugcuucgccagcggccagaacaucaccgaggaguucuaccaguccacgugcagcgccgucuccaagggguaccucggcgcccugcgcaccgggugguacaccagcgugaucaccaucgagcuguccaacaucaaggagaucaagugcaacggcaccgacgccaaggugaagcucaucaagcaggagcuggacaaguacaagaacgcggucacggaccugcagcuccugaugcagagcacccccgccaccggguccggcagcgccaucgccuccggcguggcggugugcaagguccugcaccucgagggggaggugaacaagaucaagagcgcccugcuguccaccaacaaggccguggucagccucuccggcugcggggugagcgugcugacguucaagguccuggaccucaagaacuacaucgacaagcagcugcugccgauccucaacaagcaguccugcagcauccccaacaucgagaccgugaucgaguuccagcagaagaacaaccggcugcuggagaucacccgcgaguucuccgugaacgccggcgucaccacgcccgugagcaccuacaugcucaccaacuccgagcugcugagccucaucaacgacaugcccaucaccaacgaccagaagaagcugaugagcaacaacgugcagaucguccggcagcaguccuacagcaucaugugcaucaucaaggaggaggugcuggccuacgugguccagcucccgcuguacggggugaucgacacgcccugcuggaagcugcacaccagcccccucugcaccaccaacacgaaggagggcuccaacaucugccugacccgcaccgaccggggcugguacugcgacaacgcgggguccgugagcuucuucccccaggccgagaccugcaagguccaguccaaccgcguguucugcgacacgaugaacagccugacccucccguccgaggucaaccugugcaacguggacaucuucaaccccaaguacgacugcaagaucaugaccagcaagaccgacguguccagcuccgucaucacgagccugggcgccaucguguccugcuacgggaagaccaagugcaccgccagcaacaagugccggggcaucaucaagaccuucuccaacggcugcgacuacgugagcaacaagggggucgacacgguguccgugggcaacacccucuacuacgucaacaagcaggaggggcagagccuguacgugaagggcgagcccaucaucaacuucuacgacccccugguguucccgagcgacgaguucgacgccuccaucagccaggucaacgagaagaucaaccagucccucgcguucauccgcaagagcgacgagcugcugcacaacgugaacgccgggaaguccaccaccaacaucaugaucaccacgaucaucaucgugaucaucgucauccuccugagccugaucgccgugggccugcuccuguacugcaaggcccgguccacccccgugacccugagcaaggaccagcucuccggcaucaacaacaucgccuucagcaacuga

SEQ ID NO: 21384 - RNA, 1548 nt, Artificial Sequence
  derived and/or modified CDS sequence (opt1) from HRSV(A2)__F-del_DSCav1_mut8
auggagcugcucauccugaaggccaacgccaucaccaccauccugacggcggugaccuucugcuucgccagcggccagaacaucaccgaggaguucuaccaguccacgugcagcgccgucuccaagggguaccucggcgcccugcgcaccgggugguacaccagcgugaucaccaucgagcuguccaacaucaaggagaucaagugcaacggcaccgacgccaaggugaagcucaucaagcaggagcuggacaaguacaagaacgcggucacggaccugcagcuccugaugcagagcacccccgccaccggguccggcagcgccaucgccuccggcguggcggugugcaagguccugcaccucgagggggaggugaacaagaucaagagcgcccugcuguccaccaacaaggccguggucagccucuccggcugcggggugagcgugcugacguucaagguccuggaccucaagaacuacaucgacaagcagcugcugccgauccucaacaagcaguccugcagcauccccaacaucgagaccgugaucgaguuccagcagaagaacaaccggcugcuggagaucacccgcgaguucuccgugaacgccggcgucaccacgcccgugagcaccuacaugcucaccaacuccgagcugcugagccucaucaacgacaugcccaucaccaacgaccagaagaagcugaugagcaacaacgugcagaucguccggcagcaguccuacagcaucaugugcaucaucaaggaggaggugcuggccuacgugguccagcucccgcuguacggggugaucgacacgcccugcuggaagcugcacaccagcccccucugcaccaccaacacgaaggagggcuccaacaucugccugacccgcaccgaccggggcugguacugcgacaacgcgggguccgugagcuucuucccccaggccgagaccugcaagguccaguccaaccgcguguucugcgacacgaugaacagccugacccucccguccgaggucaaccugugcaacguggacaucuucaaccccaaguacgacugcaagaucaugaccagcaagaccgacguguccagcuccgucaucacgagccugggcgccaucguguccugcuacgggaagaccaagugcaccgccagcaacaagugccggggcaucaucaagaccuucuccaacggcugcgacuacgugagcaacaagggggucgacacgguguccgugggcaacacccucuacuacgucaacaagcaggaggggcagagccuguacgugaagggcgagcccaucaucaacuucuacgacccccugguguucccgagcgacgaguucgacgccuccaucagccaggucaacgagaagaucaaccagucccucgcguucauccgcaagagcgacgagcugcugcacaacgugaacgccgggaaguccaccaccaacaucaugaucaccacgaucaucaucgugaucaucgucauccuccugagccugaucgccgugggccugcuccuguacugcaaggcccgguga

SEQ ID NO: 21385 - RNA, 771 nt, Artificial Sequence; identical to SEQ ID NO: 9686
  derived and/or modified CDS sequence (opt1) from HRSV(A2)__P0DOE7.1__M

SEQ ID NO: 21386 - RNA, 1176 nt, Artificial Sequence; identical to SEQ ID NO: 10136
  derived and/or modified CDS sequence (opt1) from HRSV(A2)__P03418.1__N

SEQ ID NO: 21387 - RNA, 726 nt, Artificial Sequence; identical to SEQ ID NO: 10639
  derived and/or modified CDS sequence (opt1) from HRSV(A2)__P03421.1__P

SEQ ID NO: 21388 - RNA, 585 nt, Artificial Sequence; identical to SEQ ID NO: 11185
  derived and/or modified CDS sequence (opt1) from HRSV(A2)__P04545.1__M2-1

SEQ ID NO: 21389 - RNA, 1725 nt, Artificial Sequence
  derived and/or modified CDS sequence (opt1) from HRSV(Memphis-37)__AIY60640.1__F0
auggagcugcccauccucaagaccaacgccaucaccacgauccuggccgcggugacccugugcuucgccagcucccagaacaucaccgaggaguucuaccagagcacgugcuccgccgucagcaagggcuaccucuccgcccugcgcaccgggugguacaccagcgugaucaccaucgagcuguccaacaucaaggagaacaagugcaacggcaccgacgccaaggugaagcucaucaagcaggagcuggacaaguacaagaacgcggucacggagcugcagcuccugaugcagagcaccccggccgccaacaaccgggcccgccgggagcugccccgcuucaugaacuacacccucaacaacaccaagaacaacaacgugacgcuguccaagaagcggaagcgccgguuccugggguuccuccugggcguggggagcgcgaucgccuccggcaucgccgucagcaaggugcugcaccucgagggcgaggugaacaagaucaagaacgcccugcuguccaccaacaaggccgucgugagccucuccaacggggugagcguccugaccuccaaggugcuggaccucaagaacuacaucgacaagcagcugcugcccaucgugaacaagcagagcugcuccaucagcaacaucgagaccgucaucgaguuccagcagaagaacaaccgccuccuggagaucacgcgggaguucagcgugaacgcgggcgugaccacccccgucuccaccuacaugcugacgaacagcgagcuccugucccugaucaacgacaugccgaucaccaacgaccagaagaagcucaugagcaacaacgugcagaucgugcgccagcaguccuacagcaucauguccaucaucaaggaggagguccuggccuacguggugcagcugccccucuacggggucaucgacacccccugcuggaagcugcacaccagcccccugugcacgaccaacaccaaggagggcuccaacaucugccucacccggacggaccgcgggugguacugcgacaacgccggcagcguguccuucuucccgcaggccgagaccugcaagguccagagcaaccggguguucugcgacaccaugaacucccugacccugcccagcgaggugaaccucugcaacaucgacaucuucaaccccaaguacgacugcaagaucaugacguccaagaccgacgucagcuccagcgugaucaccucccugggcgccaucgugagcugcuacgggaagaccaagugcacggcgagcaacaagaaccgcggcaucaucaagaccuucuccaacgggugcgacuacgucagcaacaagggcguggacaccguguccgucggcaacacccuguacuacgugaacaagcaggagggcaagagccucuacgugaagggggagcccaucaucaacuucuacgacccgcuggucuuccccuccgacgaguucgacgccagcaucucccaggugaacgagaagaucaaccagagccuggccuucauccggaaguccgacgagcugcuccacaacgugaacgucggcaagagcaccacgaacaucaugaucaccaccaucaucaucgugaucaucgugauccugcugcuccugaucgccgucgggcuguuccucuacugcaaggcccgcuccacccccgugacgcugagcaaggaccagcuguccgggaucaacaacaucgcguucagcaacuga

SEQ ID NO: 21390 - RNA, 1662 nt, Artificial Sequence
  derived and/or modified CDS sequence (opt1) from HRSV(Memphis-37)__AIY60640.1__F-del
auggagcugcccauccucaagaccaacgccaucaccacgauccuggccgcggugacccugugcuucgccagcucccagaacaucaccgaggaguucuaccagagcacgugcuccgccgucagcaagggcuaccucuccgcccugcgcaccgggugguacaccagcgugaucaccaucgagcuguccaacaucaaggagaacaagugcaacggcaccgacgccaaggugaagcucaucaagcaggagcuggacaaguacaagaacgcggucacggagcugcagcuccugaugcagagcaccccggccgccaacaaccgggcccgccgggagcugccccgcuucaugaacuacacccucaacaacaccaagaacaacaacgugacgcuguccaagaagcggaagcgccgguuccugggguuccuccugggcguggggagcgcgaucgccuccggcaucgccgucagcaaggugcugcaccucgagggcgaggugaacaagaucaagaacgcccugcuguccaccaacaaggccgucgugagccucuccaacggggugagcguccugaccuccaaggugcuggaccucaagaacuacaucgacaagcagcugcugcccaucgugaacaagcagagcugcuccaucagcaacaucgagaccgucaucgaguuccagcagaagaacaaccgccuccuggagaucacgcgggaguucagcgugaacgcgggcgugaccacccccgucuccaccuacaugcugacgaacagcgagcuccugucccugaucaacgacaugccgaucaccaacgaccagaagaagcucaugagcaacaacgugcagaucgugcgccagcaguccuacagcaucauguccaucaucaaggaggagguccuggccuacguggugcagcugccccucuacggggucaucgacacccccugcuggaagcugcacaccagcccccugugcacgaccaacaccaaggagggcuccaacaucugccucacccggacggaccgcgggugguacugcgacaacgccggcagcguguccuucuucccgcaggccgagaccugcaagguccagagcaaccggguguucugcgacaccaugaacucccugacccugcccagcgaggugaaccucugcaacaucgacaucuucaaccccaaguacgacugcaagaucaugacguccaagaccgacgucagcuccagcgugaucaccucccugggcgccaucgugagcugcuacgggaagaccaagugcacggcgagcaacaagaaccgcggcaucaucaagaccuucuccaacgggugcgacuacgucagcaacaagggcguggacaccguguccgucggcaacacccuguacuacgugaacaagcaggagggcaagagccucuacgugaagggggagcccaucaucaacuucuacgacccgcuggucuuccccuccgacgaguucgacgccagcaucucccaggugaacgagaagaucaaccagagccuggccuucauccggaaguccgacgagcugcuccacaacgugaacgucggcaagagcaccacgaacaucaugaucaccaccaucaucaucgugaucaucgugauccugcugcuccugaucgccgucgggcuguuccucuacugcaaggcccgcuga

SEQ ID NO: 21391 - RNA, 1725 nt, Artificial Sequence
  derived and/or modified CDS sequence (opt1) from HRSV(Memphis-37)__AIY60640.1__F0_DSCav1
auggagcugcccauccucaagaccaacgccaucaccacgauccuggccgcggugacccugugcuucgccagcucccagaacaucaccgaggaguucuaccagagcacgugcuccgccgucagcaagggcuaccucuccgcccugcgcaccgggugguacaccagcgugaucaccaucgagcuguccaacaucaaggagaacaagugcaacggcaccgacgccaaggugaagcucaucaagcaggagcuggacaaguacaagaacgcggucacggagcugcagcuccugaugcagagcaccccggccgccaacaaccgggcccgccgggagcugccccgcuucaugaacuacacccucaacaacaccaagaacaacaacgugacgcuguccaagaagcggaagcgccgguuccugggguuccuccugggcguggggagcgcgaucgccuccggcaucgccgucugcaaggugcugcaccucgagggcgaggugaacaagaucaagaacgcccugcugagcaccaacaaggccgucgugucccucagcaacgggguguccguccugaccuucaaggugcuggaccucaagaacuacaucgacaagcagcugcugcccauccucaacaagcagagcugcuccaucagcaacaucgagaccgugaucgaguuccagcagaagaacaaccgccugcuggagaucacgcgggaguucuccgucaacgcgggcgugaccacccccgugagcaccuacaugcucacgaacagcgagcugcugucccucaucaacgacaugccgaucaccaacgaccagaagaagcugaugagcaacaacguccagaucgugcgccagcaguccuacagcaucaugugcaucaucaaggaggaggugcuggccuacgucgugcagcucccccuguacggggugaucgacacccccugcuggaagcugcacaccagcccccucugcacgaccaacaccaaggagggcagcaacaucugccugacccggacggaccgcgggugguacugcgacaacgccggcuccgucagcuucuucccgcaggccgagaccugcaaggugcaguccaaccgggucuucugcgacaccaugaacagccugacccuccccuccgaggugaaccugugcaacaucgacaucuucaaccccaaguacgacugcaagaucaugacgagcaagaccgacguguccagcuccgucaucaccagccugggcgccaucguguccugcuacgggaagaccaagugcacggcgagcaacaagaaccgcggcaucaucaagaccuucuccaacgggugcgacuacgugagcaacaagggcgucgacaccgugagcgugggcaacacccucuacuacgucaacaagcaggaggggaagucccuguacgugaagggcgagcccaucaucaacuucuacgacccgcugguguuccccagcgacgaguucgacgccuccaucagccaggucaacgagaagaucaaccagucccuggccuucauccggaaguccgacgagcuccugcacaacgugaacguggggaaguccaccacgaacaucaugaucaccaccaucaucaucgucaucaucgugauccugcuccugcugaucgccgugggccucuuccuguacugcaaggcccgcagcacccccgucacgcuguccaaggaccagcucagcgggaucaacaacaucgcguucuccaacuga

SEQ ID NO: 21392 - RNA, 1662 nt, Artificial Sequence
  derived and/or modified CDS sequence (opt1) from HRSV(Memphis-37)__AIY60640.1__F-del_DSCav1
auggagcugcccauccucaagaccaacgccaucaccacgauccuggccgcggugacccugugcuucgccagcucccagaacaucaccgaggaguucuaccagagcacgugcuccgccgucagcaagggcuaccucuccgcccugcgcaccgggugguacaccagcgugaucaccaucgagcuguccaacaucaaggagaacaagugcaacggcaccgacgccaaggugaagcucaucaagcaggagcuggacaaguacaagaacgcggucacggagcugcagcuccugaugcagagcaccccggccgccaacaaccgggcccgccgggagcugccccgcuucaugaacuacacccucaacaacaccaagaacaacaacgugacgcuguccaagaagcggaagcgccgguuccugggguuccuccugggcguggggagcgcgaucgccuccggcaucgccgucugcaaggugcugcaccucgagggcgaggugaacaagaucaagaacgcccugcugagcaccaacaaggccgucgugucccucagcaacgggguguccguccugaccuucaaggugcuggaccucaagaacuacaucgacaagcagcugcugcccauccucaacaagcagagcugcuccaucagcaacaucgagaccgugaucgaguuccagcagaagaacaaccgccugcuggagaucacgcgggaguucuccgucaacgcgggcgugaccacccccgugagcaccuacaugcucacgaacagcgagcugcugucccucaucaacgacaugccgaucaccaacgaccagaagaagcugaugagcaacaacguccagaucgugcgccagcaguccuacagcaucaugugcaucaucaaggaggaggugcuggccuacgucgugcagcucccccuguacggggugaucgacacccccugcuggaagcugcacaccagcccccucugcacgaccaacaccaaggagggcagcaacaucugccugacccggacggaccgcgggugguacugcgacaacgccggcuccgucagcuucuucccgcaggccgagaccugcaaggugcaguccaaccgggucuucugcgacaccaugaacagccugacccuccccuccgaggugaaccugugcaacaucgacaucuucaaccccaaguacgacugcaagaucaugacgagcaagaccgacguguccagcuccgucaucaccagccugggcgccaucguguccugcuacgggaagaccaagugcacggcgagcaacaagaaccgcggcaucaucaagaccuucuccaacgggugcgacuacgugagcaacaagggcgucgacaccgugagcgugggcaacacccucuacuacgucaacaagcaggaggggaagucccuguacgugaagggcgagcccaucaucaacuucuacgacccgcugguguuccccagcgacgaguucgacgccuccaucagccaggucaacgagaagaucaaccagucccuggccuucauccggaaguccgacgagcuccugcacaacgugaacguggggaaguccaccacgaacaucaugaucaccaccaucaucaucgucaucaucgugauccugcuccugcugaucgccgugggccucuuccuguacugcaaggcccgcuga

SEQ ID NO: 21393 - RNA, 1608 nt, Artificial Sequence
  derived and/or modified CDS sequence (opt1) from HRSV(Memphis-37)__AIY60640.1__F_DSCav1_mut0
auggagcugcccauccucaagaccaacgccaucaccacgauccuggccgcggugacccugugcuucgccagcucccagaacaucaccgaggaguucuaccagagcacgugcuccgccgucagcaagggcuaccucuccgcccugcgcaccgggugguacaccagcgugaucaccaucgagcuguccaacaucaaggagaacaagugcaacggcaccgacgccaaggugaagcucaucaagcaggagcuggacaaguacaagaacgcggucacggagcugcagcuccugaugcagagcaccccggccgccggguccggcagcgccaucgcguccgggaucgccgugugcaaggugcugcaccucgagggcgaggucaacaagaucaagaacgcccugcugagcaccaacaaggccguggugucccucagcaacggcgucuccgugcugaccuucaaggugcuggaccucaagaacuacaucgacaagcagcugcugcccauccucaacaagcagagcugcuccaucagcaacaucgagacggucaucgaguuccagcagaagaacaaccggcugcuggagaucacccgcgaguucuccgugaacgccggggugaccacccccgucagcacguacaugcucaccaacagcgagcugcugucccucaucaacgacaugcccaucaccaacgaccagaagaagcugaugagcaacaacgugcagaucgugcggcagcaguccuacagcaucaugugcaucaucaaggaggagguccuggcguacguggugcagcucccgcuguacggcgucaucgacacccccugcuggaagcugcacacgagcccccucugcaccaccaacaccaaggaggggagcaacaucugccugacgcgcaccgaccggggcugguacugcgacaacgccggguccgugagcuucuucccccaggccgagaccugcaaggugcaguccaaccgcgucuucugcgacaccaugaacagccggacgcugccguccgaggugaaccucugcaacaucgacaucuucaaccccaaguacgacugcaagaucaugaccagcaagaccgacgucuccagcuccgugaucaccagccugggcgccaucguguccugcuacggcaagacgaagugcaccgccagcaacaagaaccgcgggaucaucaagaccuucuccaacggcugcgacuacgucagcaacaaggggguggacaccgugagcgucggcaacacgcuguacuacgugaacaagcaggagggcaagucccucuacgugaagggggagcccaucaucaacuucuacgacccccuggucuucccgagcgacgaguucgacgcguccaucagccaggugaacgagaagaucaaccagucccuggccuucauccggaaguccgacgagcuccugcacaacgugaacgucggcaaguccaccaccaacaucaugaucaccaccaucaucaucgugaucaucgugauccugcuccugcugaucgccgucgggcuguuccucuacugcaaggcccgcagcacgcccgugacccuguccaaggaccagcugagcggcaucaacaacaucgccuucuccaacuga

SEQ ID NO: 21394 - RNA, 1545 nt, Artificial Sequence
  derived and/or modified CDS sequence (opt1) from HRSV(Memphis-37)__AIY60640.1__F-del_DSCav1_mut0
auggagcugcccauccucaagaccaacgccaucaccacgauccuggccgcggugacccugugcuucgccagcucccagaacaucaccgaggaguucuaccagagcacgugcuccgccgucagcaagggcuaccucuccgcccugcgcaccgggugguacaccagcgugaucaccaucgagcuguccaacaucaaggagaacaagugcaacggcaccgacgccaaggugaagcucaucaagcaggagcuggacaaguacaagaacgcggucacggagcugcagcuccugaugcagagcaccccggccgccggguccggcagcgccaucgcguccgggaucgccgugugcaaggugcugcaccucgagggcgaggucaacaagaucaagaacgcccugcugagcaccaacaaggccguggugucccucagcaacggcgucuccgugcugaccuucaaggugcuggaccucaagaacuacaucgacaagcagcugcugcccauccucaacaagcagagcugcuccaucagcaacaucgagacggucaucgaguuccagcagaagaacaaccggcugcuggagaucacccgcgaguucuccgugaacgccggggugaccacccccgucagcacguacaugcucaccaacagcgagcugcugucccucaucaacgacaugcccaucaccaacgaccagaagaagcugaugagcaacaacgugcagaucgugcggcagcaguccuacagcaucaugugcaucaucaaggaggagguccuggcguacguggugcagcucccgcuguacggcgucaucgacacccccugcuggaagcugcacacgagcccccucugcaccaccaacaccaaggaggggagcaacaucugccugacgcgcaccgaccggggcugguacugcgacaacgccggguccgugagcuucuucccccaggccgagaccugcaaggugcaguccaaccgcgucuucugcgacaccaugaacagccggacgcugccguccgaggugaaccucugcaacaucgacaucuucaaccccaaguacgacugcaagaucaugaccagcaagaccgacgucuccagcuccgugaucaccagccugggcgccaucguguccugcuacggcaagacgaagugcaccgccagcaacaagaaccgcgggaucaucaagaccuucuccaacggcugcgacuacgucagcaacaaggggguggacaccgugagcgucggcaacacgcuguacuacgugaacaagcaggagggcaagucccucuacgugaagggggagcccaucaucaacuucuacgacccccuggucuucccgagcgacgaguucgacgcguccaucagccaggugaacgagaagaucaaccagucccuggccuucauccggaaguccgacgagcuccugcacaacgugaacgucggcaaguccaccaccaacaucaugaucaccaccaucaucaucgugaucaucgugauccugcuccugcugaucgccgucgggcuguuccucuacugcaaggcccgcuga

SEQ ID NO: 21395 - RNA, 1608 nt, Artificial Sequence
  derived and/or modified CDS sequence (opt1) from HRSV(Memphis-37)__AIY60640.1__F_DSCav1_mut1
auggagcugcccauccucaagaccaacgccaucaccacgauccuggccgcggugacccugugcuucgccagcucccagaacaucaccgaggaguucuaccagagcacgugcuccgccgucagcaagggcuaccucggggcccugcgcaccggcugguacaccuccgugaucaccaucgagcugagcaacaucaaggagaacaagugcaacgggaccgacgccaaggugaagcucaucaagcaggagcuggacaaguacaagaacgcggucacggagcugcagcuccugaugcaguccaccccggccgccggcagcggguccgccaucugcagcggcaucgcggugugcaaggugcugcaccucgagggcgaggucaacaagaucaagaacgcccugcuguccaccaacaaggccguggugagccucuccaacggggucagcgugcugaccuucaaggugcuggaccucaagaacuacaucgacaagcagcugcugcccauccucaacaagcaguccugcagcauccccaacaucgagacggucaucgaguuccagcagaagaacaaccggcugcuggagaucacccgcgaguucuccgugaacgccggcgugaccacccccgucagcacguacaugcucaccaacuccgagcugcugagccucaucaacgacaugccgaucaccaacgaccagaagaagcugaugagcaacaacgugcagaucgugcggcagcaguccuacagcaucaugugcaucaucaaggaggagguccuggccuacguggugcagcucccccuguacggggucaucgacacccccugcuggaagcugcacacgagcccccucugcaccaccaacaccaaggagggcuccaacaucugccugacgcgcaccgaccgggggugguacugcgacaacgcgggcuccgugagcuucuucccgcaggccgagaccugcaaggugcaguccaaccgcgucuucugcgacaccaugaacagccugacgcuccccuccgaggugaaccugugcaacaucgacaucuucaaccccaaguacgacugcaagaucaugaccagcaagaccgacgucuccagcuccgugaucaccagccugggcgccaucguguccugcuacgggaagacgaagugcaccgccagcaacaagaaccggggcaucaucaagaccuucuccaacgggugcgacuacgucagcaacaagggcguggacaccguguccgucggcaacacgcucuacugcgugaacaagcaggaggggcagagccuguacgugaagggcgagcccaucaucaacuucuacgacccgcuggucuuccccagcgacgaguucgacgccuccaucagccaggugaacgagaagaucaaccagucccucgcguucauccgcaagagcgacgagcugcugcacaacgugaacgucgggaaguccaccaccaacaucaugaucaccaccaucaucaucgugaucaucgugauccuccugcugcugaucgccgucggccucuuccuguacugcaaggcccggagcacgcccgugacccuguccaaggaccagcucagcgggaucaacaacaucgccuucuccaacuga

SEQ ID NO: 21396 - RNA, 1545 nt, Artificial Sequence
  derived and/or modified CDS sequence (opt1) from HRSV(Memphis-37)__AIY60640.1__F-del_DSCav1_mut1
auggagcugcccauccucaagaccaacgccaucaccacgauccuggccgcggugacccugugcuucgccagcucccagaacaucaccgaggaguucuaccagagcacgugcuccgccgucagcaagggcuaccucggggcccugcgcaccggcugguacaccuccgugaucaccaucgagcugagcaacaucaaggagaacaagugcaacgggaccgacgccaaggugaagcucaucaagcaggagcuggacaaguacaagaacgcggucacggagcugcagcuccugaugcaguccaccccggccgccggcagcggguccgccaucugcagcggcaucgcggugugcaaggugcugcaccucgagggcgaggucaacaagaucaagaacgcccugcuguccaccaacaaggccguggugagccucuccaacggggucagcgugcugaccuucaaggugcuggaccucaagaacuacaucgacaagcagcugcugcccauccucaacaagcaguccugcagcauccccaacaucgagacggucaucgaguuccagcagaagaacaaccggcugcuggagaucacccgcgaguucuccgugaacgccggcgugaccacccccgucagcacguacaugcucaccaacuccgagcugcugagccucaucaacgacaugccgaucaccaacgaccagaagaagcugaugagcaacaacgugcagaucgugcggcagcaguccuacagcaucaugugcaucaucaaggaggagguccuggccuacguggugcagcucccccuguacggggucaucgacacccccugcuggaagcugcacacgagcccccucugcaccaccaacaccaaggagggcuccaacaucugccugacgcgcaccgaccgggggugguacugcgacaacgcgggcuccgugagcuucuucccgcaggccgagaccugcaaggugcaguccaaccgcgucuucugcgacaccaugaacagccugacgcuccccuccgaggugaaccugugcaacaucgacaucuucaaccccaaguacgacugcaagaucaugaccagcaagaccgacgucuccagcuccgugaucaccagccugggcgccaucguguccugcuacgggaagacgaagugcaccgccagcaacaagaaccggggcaucaucaagaccuucuccaacgggugcgacuacgucagcaacaagggcguggacaccguguccgucggcaacacgcucuacugcgugaacaagcaggaggggcagagccuguacgugaagggcgagcccaucaucaacuucuacgacccgcuggucuuccccagcgacgaguucgacgccuccaucagccaggugaacgagaagaucaaccagucccucgcguucauccgcaagagcgacgagcugcugcacaacgugaacgucgggaaguccaccaccaacaucaugaucaccaccaucaucaucgugaucaucgugauccuccugcugcugaucgccgucggccucuuccuguacugcaaggcccgguga

SEQ ID NO: 21397 - RNA, 1608 nt, Artificial Sequence
  derived and/or modified CDS sequence (opt1) from HRSV(Memphis-37)__AIY60640.1__F_DSCav1_mut2
auggagcugcccauccucaagaccaacgccaucaccacgauccuggccgcggugacccugugcuucgccagcucccagaacaucaccgaggaguucuaccagagcacgugcuccgccgucagcaagggcuaccucggggcccugcgcaccggcugguacaccuccgugaucaccaucgagcugagcaacaucaaggagaacaagugcaacgggaccgacgccaaggugaagcucaucaagcaggagcuggacaaguacaagaacgcggucacggaccugcagcuccugaugcaguccaccccggccgccggcagcggguccgccaucugcagcggcaucgcggugugcaaggugcugcaccucgagggcgaggucaacaagaucaagaacgcccugcuguccaccaacaaggccguggugagccucuccaacggggucagcgugcugaccuucaaggugcuggaccucaagaacuacaucgacaagcagcugcugcccauccucaacaagcaguccugcagcauccccaacaucgagacggucaucgaguuccagcagaagaacaaccggcugcuggagaucacccgcgaguucuccgugaacgccggcgugaccacccccgucagcacguacaugcucaccaacuccgagcugcugagccucaucaacgacaugccgaucaccaacgaccagaagaagcugaugagcaacaacgugcagaucgugcggcagcaguccuacagcaucaugugcaucaucaaggaggagguccuggccuacguggugcagcucccccuguacggggucaucgacacccccugcuggaagcugcacacgagcccccucugcaccaccaacaccaaggagggcuccaacaucugccugacgcgcaccgaccgggggugguacugcgacaacgcgggcuccgugagcuucuucccgcaggccgagaccugcaaggugcaguccaaccgcgucuucugcgacaccaugaacagccugacgcuccccuccgaggugaaccugugcaacaucgacaucuucaaccccaaguacgacugcaagaucaugaccagcaagaccgacgucuccagcuccgugaucaccagccugggcgccaucguguccugcuacgggaagacgaagugcaccgccagcaacaagaaccggggcaucaucaagaccuucuccaacgggugcgacuacgucagcaacaagggcguggacaccguguccgucggcaacacgcucuacugcgugaacaagcaggaggggcagagccuguacgugaagggcgagcccaucaucaacuucuacgacccgcuggucuuccccagcgacgaguucgacgccuccaucagccaggugaacgagaagaucaaccagucccucgcguucauccgcaagagcgacgagcugcugcacaacgugaacgucgggaaguccaccaccaacaucaugaucaccaccaucaucaucgugaucaucgugauccuccugcugcugaucgccgucggccucuuccuguacugcaaggcccggagcacgcccgugacccuguccaaggaccagcucagcgggaucaacaacaucgccuucuccaacuga

SEQ ID NO: 21398 - RNA, 1545 nt, Artificial Sequence
  derived and/or modified CDS sequence (opt1) from HRSV(Memphis-37)__AIY60640.1__F-del_DSCav1_mut2
auggagcugcccauccucaagaccaacgccaucaccacgauccuggccgcggugacccugugcuucgccagcucccagaacaucaccgaggaguucuaccagagcacgugcuccgccgucagcaagggcuaccucggggcccugcgcaccggcugguacaccuccgugaucaccaucgagcugagcaacaucaaggagaacaagugcaacgggaccgacgccaaggugaagcucaucaagcaggagcuggacaaguacaagaacgcggucacggaccugcagcuccugaugcaguccaccccggccgccggcagcggguccgccaucugcagcggcaucgcggugugcaaggugcugcaccucgagggcgaggucaacaagaucaagaacgcccugcuguccaccaacaaggccguggugagccucuccaacggggucagcgugcugaccuucaaggugcuggaccucaagaacuacaucgacaagcagcugcugcccauccucaacaagcaguccugcagcauccccaacaucgagacggucaucgaguuccagcagaagaacaaccggcugcuggagaucacccgcgaguucuccgugaacgccggcgugaccacccccgucagcacguacaugcucaccaacuccgagcugcugagccucaucaacgacaugccgaucaccaacgaccagaagaagcugaugagcaacaacgugcagaucgugcggcagcaguccuacagcaucaugugcaucaucaaggaggagguccuggccuacguggugcagcucccccuguacggggucaucgacacccccugcuggaagcugcacacgagcccccucugcaccaccaacaccaaggagggcuccaacaucugccugacgcgcaccgaccgggggugguacugcgacaacgcgggcuccgugagcuucuucccgcaggccgagaccugcaaggugcaguccaaccgcgucuucugcgacaccaugaacagccugacgcuccccuccgaggugaaccugugcaacaucgacaucuucaaccccaaguacgacugcaagaucaugaccagcaagaccgacgucuccagcuccgugaucaccagccugggcgccaucguguccugcuacgggaagacgaagugcaccgccagcaacaagaaccggggcaucaucaagaccuucuccaacgggugcgacuacgucagcaacaagggcguggacaccguguccgucggcaacacgcucuacugcgugaacaagcaggaggggcagagccuguacgugaagggcgagcccaucaucaacuucuacgacccgcuggucuuccccagcgacgaguucgacgccuccaucagccaggugaacgagaagaucaaccagucccucgcguucauccgcaagagcgacgagcugcugcacaacgugaacgucgggaaguccaccaccaacaucaugaucaccaccaucaucaucgugaucaucgugauccuccugcugcugaucgccgucggccucuuccuguacugcaaggcccgguga

SEQ ID NO: 21399 - RNA, 1608 nt, Artificial Sequence
  derived and/or modified CDS sequence (opt1) from HRSV(Memphis-37)__AIY60640.1__F_DSCav1_mut3
auggagcugcccauccucaagaccaacgccaucaccacgauccuggccgcggugacccugugcuucgccagcucccagaacaucaccgaggaguucuaccagagcacgugcuccgccgucagcaagggcuaccucggggcccugcgcaccggcugguacaccuccgugaucaccaucgagcugagcaacaucaaggagaucaagugcaacgggaccgacgccaaggugaagcucaucaagcaggagcuggacaaguacaagaacgcggucacggaccugcagcuccugaugcaguccaccccggccgccggcagcggguccgccaucugcagcggcaucgcggugugcaaggugcugcaccucgagggcgaggucaacaagaucaagaacgcccugcuguccaccaacaaggccguggugagccucuccaacggggucagcgugcugaccuucaaggugcuggaccucaagaacuacaucgacaagcagcugcugcccauccucaacaagcaguccugcagcauccccaacaucgagacggucaucgaguuccagcagaagaacaaccggcugcuggagaucacccgcgaguucuccgugaacgccggcgugaccacccccgucagcacguacaugcucaccaacuccgagcugcugagccucaucaacgacaugccgaucaccaacgaccagaagaagcugaugagcaacaacgugcagaucgugcggcagcaguccuacagcaucaugugcaucaucaaggaggagguccuggccuacguggugcagcucccccuguacggggucaucgacacccccugcuggaagcugcacacgagcccccucugcaccaccaacaccaaggagggcuccaacaucugccugacgcgcaccgaccgggggugguacugcgacaacgcgggcuccgugagcuucuucccgcaggccgagaccugcaaggugcaguccaaccgcgucuucugcgacaccaugaacagccugacgcuccccuccgaggugaaccugugcaacaucgacaucuucaaccccaaguacgacugcaagaucaugaccagcaagaccgacgucuccagcuccgugaucaccagccugggcgccaucguguccugcuacgggaagacgaagugcaccgccagcaacaagaaccggggcaucaucaagaccuucuccaacgggugcgacuacgucagcaacaagggcguggacaccguguccgucggcaacacgcucuacugcgugaacaagcaggaggggcagagccuguacgugaagggcgagcccaucaucaacuucuacgacccgcuggucuuccccagcgacgaguucgacgccuccaucagccaggugaacgagaagaucaaccagucccucgcguucauccgcaagagcgacgagcugcugcacaacgugaacgucgggaaguccaccaccaacaucaugaucaccaccaucaucaucgugaucaucgugauccuccugcugcugaucgccgucggccucuuccuguacugcaaggcccggagcacgcccgugacccuguccaaggaccagcucagcgggaucaacaacaucgccuucuccaacuga

SEQ ID NO: 21400 - RNA, 1545 nt, Artificial Sequence
  derived and/or modified CDS sequence (opt1) from HRSV(Memphis-37)__AIY60640.1__F-del_DSCav1_mut3
auggagcugcccauccucaagaccaacgccaucaccacgauccuggccgcggugacccugugcuucgccagcucccagaacaucaccgaggaguucuaccagagcacgugcuccgccgucagcaagggcuaccucggggcccugcgcaccggcugguacaccuccgugaucaccaucgagcugagcaacaucaaggagaucaagugcaacgggaccgacgccaaggugaagcucaucaagcaggagcuggacaaguacaagaacgcggucacggaccugcagcuccugaugcaguccaccccggccgccggcagcggguccgccaucugcagcggcaucgcggugugcaaggugcugcaccucgagggcgaggucaacaagaucaagaacgcccugcuguccaccaacaaggccguggugagccucuccaacggggucagcgugcugaccuucaaggugcuggaccucaagaacuacaucgacaagcagcugcugcccauccucaacaagcaguccugcagcauccccaacaucgagacggucaucgaguuccagcagaagaacaaccggcugcuggagaucacccgcgaguucuccgugaacgccggcgugaccacccccgucagcacguacaugcucaccaacuccgagcugcugagccucaucaacgacaugccgaucaccaacgaccagaagaagcugaugagcaacaacgugcagaucgugcggcagcaguccuacagcaucaugugcaucaucaaggaggagguccuggccuacguggugcagcucccccuguacggggucaucgacacccccugcuggaagcugcacacgagcccccucugcaccaccaacaccaaggagggcuccaacaucugccugacgcgcaccgaccgggggugguacugcgacaacgcgggcuccgugagcuucuucccgcaggccgagaccugcaaggugcaguccaaccgcgucuucugcgacaccaugaacagccugacgcuccccuccgaggugaaccugugcaacaucgacaucuucaaccccaaguacgacugcaagaucaugaccagcaagaccgacgucuccagcuccgugaucaccagccugggcgccaucguguccugcuacgggaagacgaagugcaccgccagcaacaagaaccggggcaucaucaagaccuucuccaacgggugcgacuacgucagcaacaagggcguggacaccguguccgucggcaacacgcucuacugcgugaacaagcaggaggggcagagccuguacgugaagggcgagcccaucaucaacuucuacgacccgcuggucuuccccagcgacgaguucgacgccuccaucagccaggugaacgagaagaucaaccagucccucgcguucauccgcaagagcgacgagcugcugcacaacgugaacgucgggaaguccaccaccaacaucaugaucaccaccaucaucaucgugaucaucgugauccuccugcugcugaucgccgucggccucuuccuguacugcaaggcccgguga

SEQ ID NO: 21401 - RNA, 1608 nt, Artificial Sequence
  derived and/or modified CDS sequence (opt1) from HRSV(Memphis-37)__AIY60640.1__F_DSCav1_mut4
auggagcugcccauccucaagaccaacgccaucaccacgauccuggccgcggugacccugugcuucgccagcucccagaacaucaccgaggaguucuaccagagcacgugcuccgccgucagcaagggcuaccucuccgcccugcgcaccgggugguacaccagcgugaucaccaucgagcuguccaacaucaaggagaacaagugcaacggcaccgacgccaaggugaagcucaucaagcaggagcuggacaaguacaagaacgcggucacggagcugcagcuccugaugcagagcaccccggccgccggguccggcagcgccaucugcuccgggaucgcggugugcaaggugcugcaccucgagggcgaggucaacaagaucaagaacgcccugcugagcaccaacaaggccguggugucccucagcaacggcgucuccgugcugaccuucaaggugcuggaccucaagaacuacaucgacaagcagcugcugcccauccucaacaagcagagcugcuccaucagcaacaucgagacggucaucgaguuccagcagaagaacaaccggcugcuggagaucacccgcgaguucuccgugaacgccggggugaccacccccgucagcacguacaugcucaccaacagcgagcugcugucccucaucaacgacaugcccaucaccaacgaccagaagaagcugaugagcaacaacgugcagaucgugcggcagcaguccuacagcaucaugugcaucaucaaggaggagguccuggccuacguggugcagcucccgcuguacggcgucaucgacacccccugcuggaagcugcacacgagcccccucugcaccaccaacaccaaggaggggagcaacaucugccugacgcgcaccgaccggggcugguacugcgacaacgcgggguccgugagcuucuucccccaggccgagaccugcaaggugcaguccaaccgcgucuucugcgacaccaugaacagccggacgcugccguccgaggugaaccucugcaacaucgacaucuucaaccccaaguacgacugcaagaucaugaccagcaagaccgacgucuccagcuccgugaucaccagccugggcgccaucguguccugcuacggcaagacgaagugcaccgccagcaacaagaaccgcgggaucaucaagaccuucuccaacggcugcgacuacgucagcaacaaggggguggacaccgugagcgucggcaacacgcuguacugcgugaacaagcaggagggcaagucccucuacgugaagggggagcccaucaucaacuucuacgacccccuggucuucccgagcgacgaguucgacgccuccaucagccaggugaacgagaagaucaaccagucccuggcguucauccggaaguccgacgagcuccugcacaacgugaacgucggcaaguccaccaccaacaucaugaucaccaccaucaucaucgugaucaucgugauccugcuccugcugaucgccgucgggcuguuccucuacugcaaggcccgcagcacgcccgugacccuguccaaggaccagcugagcggcaucaacaacaucgccuucuccaacuga

SEQ ID NO: 21402 - RNA, 1545 nt, Artificial Sequence
  derived and/or modified CDS sequence (opt1) from HRSV(Memphis-37)__AIY60640.1__F-del_DSCav1_mut4
auggagcugcccauccucaagaccaacgccaucaccacgauccuggccgcggugacccugugcuucgccagcucccagaacaucaccgaggaguucuaccagagcacgugcuccgccgucagcaagggcuaccucuccgcccugcgcaccgggugguacaccagcgugaucaccaucgagcuguccaacaucaaggagaacaagugcaacggcaccgacgccaaggugaagcucaucaagcaggagcuggacaaguacaagaacgcggucacggagcugcagcuccugaugcagagcaccccggccgccggguccggcagcgccaucugcuccgggaucgcggugugcaaggugcugcaccucgagggcgaggucaacaagaucaagaacgcccugcugagcaccaacaaggccguggugucccucagcaacggcgucuccgugcugaccuucaaggugcuggaccucaagaacuacaucgacaagcagcugcugcccauccucaacaagcagagcugcuccaucagcaacaucgagacggucaucgaguuccagcagaagaacaaccggcugcuggagaucacccgcgaguucuccgugaacgccggggugaccacccccgucagcacguacaugcucaccaacagcgagcugcugucccucaucaacgacaugcccaucaccaacgaccagaagaagcugaugagcaacaacgugcagaucgugcggcagcaguccuacagcaucaugugcaucaucaaggaggagguccuggccuacguggugcagcucccgcuguacggcgucaucgacacccccugcuggaagcugcacacgagcccccucugcaccaccaacaccaaggaggggagcaacaucugccugacgcgcaccgaccggggcugguacugcgacaacgcgggguccgugagcuucuucccccaggccgagaccugcaaggugcaguccaaccgcgucuucugcgacaccaugaacagccggacgcugccguccgaggugaaccucugcaacaucgacaucuucaaccccaaguacgacugcaagaucaugaccagcaagaccgacgucuccagcuccgugaucaccagccugggcgccaucguguccugcuacggcaagacgaagugcaccgccagcaacaagaaccgcgggaucaucaagaccuucuccaacggcugcgacuacgucagcaacaaggggguggacaccgugagcgucggcaacacgcuguacugcgugaacaagcaggagggcaagucccucuacgugaagggggagcccaucaucaacuucuacgacccccuggucuucccgagcgacgaguucgacgccuccaucagccaggugaacgagaagaucaaccagucccuggcguucauccggaaguccgacgagcuccugcacaacgugaacgucggcaaguccaccaccaacaucaugaucaccaccaucaucaucgugaucaucgugauccugcuccugcugaucgccgucgggcuguuccucuacugcaaggcccgcuga

SEQ ID NO: 21403 - RNA, 1611 nt, Artificial Sequence
  derived and/or modified CDS sequence (opt1) from HRSV(Memphis-37)__AIY60640.1__F_DSCav1_mut5
auggagcugcccauccucaagaccaacgccaucaccacgauccuggccgcggugacccugugcuucgccagcucccagaacaucaccgaggaguucuaccagagcacgugcuccgccgucagcaagggcuaccucuccgcccugcgcaccgggugguacaccagcgugaucaccaucgagcuguccaacaucaaggagaacaagugcaacggcaccgacgccaaggugaagcucaucaagcaggagcuggacaaguacaagaacgcggucacggagcugcagcuccugaugcagagcaccccggccgccggguccggcagcgccaucgcguccgggaucgccgugugcaaggugcugcaccucgagggcgaggucaacaagaucaagaacgcccugcugagcaccaacaaggccguggugucccucagcggcugcggggucuccgugcugaccuucaaggugcuggaccucaagaacuacaucgacaagcagcugcugcccauccucaacaagcagagcugcuccaucagcaacaucgagacggucaucgaguuccagcagaagaacaaccggcugcuggagaucacccgcgaguucuccgugaacgccggcgugaccacccccgucagcacguacaugcucaccaacagcgagcugcugucccucaucaacgacaugcccaucaccaacgaccagaagaagcugaugagcaacaacgugcagaucgugcggcagcaguccuacagcaucaugugcaucaucaaggaggagguccuggcguacguggugcagcucccgcuguacggggucaucgacacccccugcuggaagcugcacacgagcccccucugcaccaccaacaccaaggagggcagcaacaucugccugacgcgcaccgaccgggggugguacugcgacaacgccggcuccgugagcuucuucccccaggccgagaccugcaaggugcaguccaaccgcgucuucugcgacaccaugaacagccggacgcugccguccgaggugaaccucugcaacaucgacaucuucaaccccaaguacgacugcaagaucaugaccagcaagaccgacgucuccagcuccgugaucaccagccugggcgccaucguguccugcuacgggaagacgaagugcaccgccagcaacaagugccgcggcaucaucaagaccuucuccaacgggugcgacuacgucagcaacaagggcguggacaccgugagcgucggcaacacgcuguacuacgugaacaagcaggaggggaagucccucuacgugaagggcgagcccaucaucaacuucuacgacccccuggucuucccgagcgacgaguucgacgcguccaucagccaggugaacgagaagaucaaccagucccuggccuucauccggaaguccgacgagcuccugcacaacgugaacgucgggaaguccaccaccaacaucaugaucaccaccaucaucaucgugaucaucgugauccugcuccugcugaucgccgucggccuguuccucuacugcaaggcccgcagcacgcccgugacccuguccaaggaccagcugagcgggaucaacaacaucgccuucuccaacuga

SEQ ID NO: 21404 - RNA, 1548 nt, Artificial Sequence
  derived and/or modified CDS sequence (opt1) from HRSV(Memphis-37)__AIY60640.1__F-del_DSCav1_mut5
auggagcugcccauccucaagaccaacgccaucaccacgauccuggccgcggugacccugugcuucgccagcucccagaacaucaccgaggaguucuaccagagcacgugcuccgccgucagcaagggcuaccucuccgcccugcgcaccgggugguacaccagcgugaucaccaucgagcuguccaacaucaaggagaacaagugcaacggcaccgacgccaaggugaagcucaucaagcaggagcuggacaaguacaagaacgcggucacggagcugcagcuccugaugcagagcaccccggccgccggguccggcagcgccaucgcguccgggaucgccgugugcaaggugcugcaccucgagggcgaggucaacaagaucaagaacgcccugcugagcaccaacaaggccguggugucccucagcggcugcggggucuccgugcugaccuucaaggugcuggaccucaagaacuacaucgacaagcagcugcugcccauccucaacaagcagagcugcuccaucagcaacaucgagacggucaucgaguuccagcagaagaacaaccggcugcuggagaucacccgcgaguucuccgugaacgccggcgugaccacccccgucagcacguacaugcucaccaacagcgagcugcugucccucaucaacgacaugcccaucaccaacgaccagaagaagcugaugagcaacaacgugcagaucgugcggcagcaguccuacagcaucaugugcaucaucaaggaggagguccuggcguacguggugcagcucccgcuguacggggucaucgacacccccugcuggaagcugcacacgagcccccucugcaccaccaacaccaaggagggcagcaacaucugccugacgcgcaccgaccgggggugguacugcgacaacgccggcuccgugagcuucuucccccaggccgagaccugcaaggugcaguccaaccgcgucuucugcgacaccaugaacagccggacgcugccguccgaggugaaccucugcaacaucgacaucuucaaccccaaguacgacugcaagaucaugaccagcaagaccgacgucuccagcuccgugaucaccagccugggcgccaucguguccugcuacgggaagacgaagugcaccgccagcaacaagugccgcggcaucaucaagaccuucuccaacgggugcgacuacgucagcaacaagggcguggacaccgugagcgucggcaacacgcuguacuacgugaacaagcaggaggggaagucccucuacgugaagggcgagcccaucaucaacuucuacgacccccuggucuucccgagcgacgaguucgacgcguccaucagccaggugaacgagaagaucaaccagucccuggccuucauccggaaguccgacgagcuccugcacaacgugaacgucgggaaguccaccaccaacaucaugaucaccaccaucaucaucgugaucaucgugauccugcuccugcugaucgccgucggccuguuccucuacugcaaggcccgcuga

SEQ ID NO: 21405 - RNA, 1608 nt, Artificial Sequence
  derived and/or modified CDS sequence (opt1) from HRSV(Memphis-37)__AIY60640.1__F_DSCav1_mut6
auggagcugcccauccucaagaccaacgccaucaccacgauccuggccgcggugacccugugcuucgccagcucccagaacaucaccgaggaguucuaccagagcacgugcuccgccgucagcaagggcuaccucggggcccugcgcaccggcugguacaccuccgugaucaccaucgagcugagcaacaucaaggagaacaagugcaacgggaccgacgccaaggugaagcucaucaagcaggagcuggacaaguacaagaacgcggucacggaccugcagaugcucaugugcuccaccccggccgccggcagcggguccgccaucgcgagcggcaucgccgugugcaaggugcugcaccuggagggcgaggucaacaagaucaagaacgcccuccuguccaccaacaaggccguggugagccuguccaacggggucagcgugcucaccuucaaggugcuggaccugaagaacuacaucgacaagcagcuccugcccauccugaacaagcaguccugcagcauccccaaccccgagacggucauggaguuccagcagaagaacaaccggcuccuggagaucacccgcgaguucuccgugaacgccggcgugaccaccccggucagcacguacaugcugaccaacuccgagcuccugagccugaucaacgacaugcccaucaccaacgaccagaagaagcucaugagcaacaacgugcagaucgugcggcagcaguccuacagcaucaugugcaucaucaaggaggagguccuggcguacguggugcagcugccccucuacggggucaucgacacccccugcuggaagcugcacacguccccgcugugcaccaccaacaccaaggagggcagcaacaucugccucacgcgcaccgaccgggggugguacugcgacaacgccggcuccgugagcuucuucccccaggccgagaccugcaaggugugcuccaaccgcgucuucugcgacaccaugaacagccugacgcugcccuccgaggugaaccucugcaacaucgacaucuucaaccccaaguacgacugcaagaucaugaccagcaagaccgacgucuccagcuccgugaucaccagccugggcgccaucguguccugcuacgggaagacgaagugcaccgccagcaacaagaacaagggcaucaucaagaccuucuccaacgggugcgacuacgucagcaacaagggcguggacaccguguccgucggcaacacgcuguacuacgugaacaagcaggaggggcagagccucuacgugaagggcgagccgaucaucaacuucuacgacccccuggucuuccccagcgacgaguucgacgcguccaucagccaggugaacgagaagaucaaccagucccuggccuucauccgcaagagcgacgagcuccugcacaacgugaacgucgggaaguccaccaccaacaucaugaucaccaccaucaucaucgugaucaucgugauccugcuccugcugaucgccgucggccuguuccucuacugcaaggcccggagcacgcccgugacccuguccaaggaccagcugagcgggaucaacaacaucgccuucuccaacuga

SEQ ID NO: 21406 - RNA, 1545 nt, Artificial Sequence
  derived and/or modified CDS sequence (opt1) from HRSV(Memphis-37)__AIY60640.1__F-del_DSCav1_mut6
auggagcugcccauccucaagaccaacgccaucaccacgauccuggccgcggugacccugugcuucgccagcucccagaacaucaccgaggaguucuaccagagcacgugcuccgccgucagcaagggcuaccucggggcccugcgcaccggcugguacaccuccgugaucaccaucgagcugagcaacaucaaggagaacaagugcaacgggaccgacgccaaggugaagcucaucaagcaggagcuggacaaguacaagaacgcggucacggaccugcagaugcucaugugcuccaccccggccgccggcagcggguccgccaucgcgagcggcaucgccgugugcaaggugcugcaccuggagggcgaggucaacaagaucaagaacgcccuccuguccaccaacaaggccguggugagccuguccaacggggucagcgugcucaccuucaaggugcuggaccugaagaacuacaucgacaagcagcuccugcccauccugaacaagcaguccugcagcauccccaaccccgagacggucauggaguuccagcagaagaacaaccggcuccuggagaucacccgcgaguucuccgugaacgccggcgugaccaccccggucagcacguacaugcugaccaacuccgagcuccugagccugaucaacgacaugcccaucaccaacgaccagaagaagcucaugagcaacaacgugcagaucgugcggcagcaguccuacagcaucaugugcaucaucaaggaggagguccuggcguacguggugcagcugccccucuacggggucaucgacacccccugcuggaagcugcacacguccccgcugugcaccaccaacaccaaggagggcagcaacaucugccucacgcgcaccgaccgggggugguacugcgacaacgccggcuccgugagcuucuucccccaggccgagaccugcaaggugugcuccaaccgcgucuucugcgacaccaugaacagccugacgcugcccuccgaggugaaccucugcaacaucgacaucuucaaccccaaguacgacugcaagaucaugaccagcaagaccgacgucuccagcuccgugaucaccagccugggcgccaucguguccugcuacgggaagacgaagugcaccgccagcaacaagaacaagggcaucaucaagaccuucuccaacgggugcgacuacgucagcaacaagggcguggacaccguguccgucggcaacacgcuguacuacgugaacaagcaggaggggcagagccucuacgugaagggcgagccgaucaucaacuucuacgacccccuggucuuccccagcgacgaguucgacgcguccaucagccaggugaacgagaagaucaaccagucccuggccuucauccgcaagagcgacgagcuccugcacaacgugaacgucgggaaguccaccaccaacaucaugaucaccaccaucaucaucgugaucaucgugauccugcuccugcugaucgccgucggccuguuccucuacugcaaggcccgguga

SEQ ID NO: 21407 - RNA, 1608 nt, Artificial Sequence
  derived and/or modified CDS sequence (opt1) from HRSV(Memphis-37)__AIY60640.1__F_DSCav1_mut7
auggagcugcccauccucaagaccaacgccaucaccacgauccuggccgcggugacccugugcuucgccagcucccagaacaucaccgaggaguucuaccagagcacgugcuccgccgucagcaagggcuaccucuccgcccugcgcaccgggugguacaccagcgugaucaccaucgagcuguccaacaucaaggagaacaagugcaacggcaccgacgccaaggugaagcucaucaagcaggagcuggacaaguacaagaacgcggucacggagcugcagaugcucaugugcagcaccccggccgccggguccggcagcgccaucgcguccgggaucgccgugugcaaggugcugcaccuggagggcgaggucaacaagaucaagaacgcccuccugagcaccaacaaggccguggugucccugagcaacggcgucuccgugcucaccuucaaggugcuggaccugaagaacuacaucgacaagcagcuccugcccauccugaacaagcagagcugcuccaucagcaacaucgagacggucauggaguuccagcagaagaacaaccggcuccuggagaucacccgcgaguucuccgugaacgccggggugaccacccccgucagcacguacaugcugaccaacagcgagcuccugucccugaucaacgacaugcccaucaccaacgaccagaagaagcucaugagcaacaacgugcagaucgugcggcagcaguccuacagcaucaugugcaucaucaaggaggagguccuggcguacguggugcagcugccgcucuacggcgucaucgacacccccugcuggaagcugcacacgagcccccugugcaccaccaacaccaaggaggggagcaacaucugccucacgcgcaccgaccggggcugguacugcgacaacgccggguccgugagcuucuucccccaggccgagaccugcaaggugugcuccaaccgcgucuucugcgacaccaugaacagccugacgcugccguccgaggugaaccucugcaacaucgacaucuucaaccccaaguacgacugcaagaucaugaccagcaagaccgacgucuccagcuccgugaucaccagccugggcgccaucguguccugcuacggcaagacgaagugcaccgccagcaacaagaacaaggggaucaucaagaccuucuccaacggcugcgacuacgucagcaacaaggggguggacaccgugagcgucggcaacacgcuguacuacgugaacaagcaggagggcaagucccucuacgugaagggggagcccaucaucaacuucuacgacccccuggucuucccgagcgacgaguucgacgcguccaucagccaggugaacgagaagaucaaccagucccuggccuucauccggaaguccgacgagcuccugcacaacgugaacgucggcaaguccaccaccaacaucaugaucaccaccaucaucaucgugaucaucgugauccugcuccugcugaucgccgucgggcuguuccucuacugcaaggcccgcagcacgcccgugacccuguccaaggaccagcugagcggcaucaacaacaucgccuucuccaacuga

SEQ ID NO: 21408 - RNA, 1545 nt, Artificial Sequence
  derived and/or modified CDS sequence (opt1) from HRSV(Memphis-37)__AIY60640.1__F-del_DSCav1_mut7
auggagcugcccauccucaagaccaacgccaucaccacgauccuggccgcggugacccugugcuucgccagcucccagaacaucaccgaggaguucuaccagagcacgugcuccgccgucagcaagggcuaccucuccgcccugcgcaccgggugguacaccagcgugaucaccaucgagcuguccaacaucaaggagaacaagugcaacggcaccgacgccaaggugaagcucaucaagcaggagcuggacaaguacaagaacgcggucacggagcugcagaugcucaugugcagcaccccggccgccggguccggcagcgccaucgcguccgggaucgccgugugcaaggugcugcaccuggagggcgaggucaacaagaucaagaacgcccuccugagcaccaacaaggccguggugucccugagcaacggcgucuccgugcucaccuucaaggugcuggaccugaagaacuacaucgacaagcagcuccugcccauccugaacaagcagagcugcuccaucagcaacaucgagacggucauggaguuccagcagaagaacaaccggcuccuggagaucacccgcgaguucuccgugaacgccggggugaccacccccgucagcacguacaugcugaccaacagcgagcuccugucccugaucaacgacaugcccaucaccaacgaccagaagaagcucaugagcaacaacgugcagaucgugcggcagcaguccuacagcaucaugugcaucaucaaggaggagguccuggcguacguggugcagcugccgcucuacggcgucaucgacacccccugcuggaagcugcacacgagcccccugugcaccaccaacaccaaggaggggagcaacaucugccucacgcgcaccgaccggggcugguacugcgacaacgccggguccgugagcuucuucccccaggccgagaccugcaaggugugcuccaaccgcgucuucugcgacaccaugaacagccugacgcugccguccgaggugaaccucugcaacaucgacaucuucaaccccaaguacgacugcaagaucaugaccagcaagaccgacgucuccagcuccgugaucaccagccugggcgccaucguguccugcuacggcaagacgaagugcaccgccagcaacaagaacaaggggaucaucaagaccuucuccaacggcugcgacuacgucagcaacaaggggguggacaccgugagcgucggcaacacgcuguacuacgugaacaagcaggagggcaagucccucuacgugaagggggagcccaucaucaacuucuacgacccccuggucuucccgagcgacgaguucgacgcguccaucagccaggugaacgagaagaucaaccagucccuggccuucauccggaaguccgacgagcuccugcacaacgugaacgucggcaaguccaccaccaacaucaugaucaccaccaucaucaucgugaucaucgugauccugcuccugcugaucgccgucgggcuguuccucuacugcaaggcccgcuga

SEQ ID NO: 21409 - RNA, 1611 nt, Artificial Sequence
  derived and/or modified CDS sequence (opt1) from HRSV(Memphis-37)__AIY60640.1__F_DSCav1_mut8
auggagcugcccauccucaagaccaacgccaucaccacgauccuggccgcggugacccugugcuucgccagcucccagaacaucaccgaggaguucuaccagagcacgugcuccgccgucagcaagggcuaccucggggcccugcgcaccggcugguacaccuccgugaucaccaucgagcugagcaacaucaaggagaucaagugcaacgggaccgacgccaaggugaagcucaucaagcaggagcuggacaaguacaagaacgcggucacggaccugcagcuccugaugcaguccaccccggccgccggcagcggguccgccaucgcgagcggcaucgccgugugcaaggugcugcaccucgagggcgaggucaacaagaucaagaacgcccugcuguccaccaacaaggccguggugagccucuccgggugcggcgucagcgugcugaccuucaaggugcuggaccucaagaacuacaucgacaagcagcugcugcccauccucaacaagcaguccugcagcauccccaacaucgagacggucaucgaguuccagcagaagaacaaccggcugcuggagaucacccgcgaguucuccgugaacgccggggugaccacccccgucagcacguacaugcucaccaacuccgagcugcugagccucaucaacgacaugccgaucaccaacgaccagaagaagcugaugagcaacaacgugcagaucgugcggcagcaguccuacagcaucaugugcaucaucaaggaggagguccuggcguacguggugcagcucccccuguacggcgucaucgacacccccugcuggaagcugcacacgagcccccucugcaccaccaacaccaaggagggguccaacaucugccugacgcgcaccgaccggggcugguacugcgacaacgccggcuccgugagcuucuucccgcaggccgagaccugcaaggugcaguccaaccgcgucuucugcgacaccaugaacagccugacgcuccccuccgaggugaaccugugcaacaucgacaucuucaaccccaaguacgacugcaagaucaugaccagcaagaccgacgucuccagcuccgugaucaccagccugggggccaucguguccugcuacggcaagacgaagugcaccgccagcaacaagugccgggggaucaucaagaccuucuccaacggcugcgacuacgucagcaacaagggcguggacaccguguccgucgggaacacgcucuacuacgugaacaagcaggagggccagagccuguacgugaagggggagcccaucaucaacuucuacgacccgcuggucuuccccagcgacgaguucgacgcguccaucagccaggugaacgagaagaucaaccagucccucgccuucauccgcaagagcgacgagcugcugcacaacgugaacgucggcaaguccaccaccaacaucaugaucaccaccaucaucaucgugaucaucgugauccuccugcugcugaucgccgucggccucuuccuguacugcaaggcccggagcacgcccgugacccuguccaaggaccagcucagcgggaucaacaacaucgccuucuccaacuga

SEQ ID NO: 21410 - RNA, 1548 nt, Artificial Sequence
  derived and/or modified CDS sequence (opt1) from HRSV(Memphis-37)__AIY60640.1__F-del_DSCav1_mut8
auggagcugcccauccucaagaccaacgccaucaccacgauccuggccgcggugacccugugcuucgccagcucccagaacaucaccgaggaguucuaccagagcacgugcuccgccgucagcaagggguaccucggggcccugcgcaccggcugguacaccuccgugaucaccaucgagcugagcaacaucaaggagaucaagugcaacgggaccgacgccaaggugaagcucaucaagcaggagcuggacaaguacaagaacgcggucacggaccugcagcuccugaugcaguccaccccggccgccggcagcggguccgccaucgcgagcggcaucgccgugugcaaggugcugcaccucgagggcgaggucaacaagaucaagaacgcccugcuguccaccaacaaggccguggugagccucuccgggugcggcgucagcgugcugaccuucaaggugcuggaccucaagaacuacaucgacaagcagcugcugcccauccucaacaagcaguccugcagcauccccaacaucgagacggucaucgaguuccagcagaagaacaaccggcugcuggagaucacccgcgaguucuccgugaacgccggggugaccacccccgucagcacguacaugcucaccaacuccgagcugcugagccucaucaacgacaugccgaucaccaacgaccagaagaagcugaugagcaacaacgugcagaucgugcggcagcaguccuacagcaucaugugcaucaucaaggaggagguccuggcguacguggugcagcucccccuguacggcgucaucgacacccccugcuggaagcugcacacgagcccccucugcaccaccaacaccaaggagggguccaacaucugccugacgcgcaccgaccggggcugguacugcgacaacgccggcuccgugagcuucuucccgcaggccgagaccugcaaggugcaguccaaccgcgucuucugcgacaccaugaacagccugacgcuccccuccgaggugaaccugugcaacaucgacaucuucaaccccaaguacgacugcaagaucaugaccagcaagaccgacgucuccagcuccgugaucaccagccugggggccaucguguccugcuacggcaagacgaagugcaccgccagcaacaagugccgggggaucaucaagaccuucuccaacggcugcgacuacgucagcaacaagggcguggacaccguguccgucgggaacacgcucuacuacgugaacaagcaggagggccagagccuguacgugaagggggagcccaucaucaacuucuacgacccgcuggucuuccccagcgacgaguucgacgcguccaucagccaggugaacgagaagaucaaccagucccucgccuucauccgcaagagcgacgagcugcugcacaacgugaacgucggcaaguccaccaccaacaucaugaucaccaccaucaucaucgugaucaucgugauccuccugcugcugaucgccgucggccucuuccuguacugcaaggcccgguga

SEQ ID NO: 21411 - RNA, 771 nt, Artificial Sequence; identical to SEQ ID NO: 9686
  derived and/or modified CDS sequence (opt1) from HRSV(Memphis-37)__AIY60638.1__M

SEQ ID NO: 21412 - RNA, 1176 nt, Artificial Sequence; identical to SEQ ID NO: 20215
  derived and/or modified CDS sequence (opt1) from HRSV(Memphis-37)__AIY60635.1__N

SEQ ID NO: 21413 - RNA, 726 nt, Artificial Sequence; identical to SEQ ID NO: 20584
  derived and/or modified CDS sequence (opt1) from HRSV(Memphis-37)__AIY60637.1__P

SEQ ID NO: 21414 - RNA, 585 nt, Artificial Sequence; identical to SEQ ID NO: 20953
  derived and/or modified CDS sequence (opt1) from HRSV(Memphis-37)__AIY60641.1__M2-1

SEQ ID NO: 21415 - RNA, 1997 nt, Artificial Sequence
  mRNA product Design a-1 (hSL-A100) comprising derived and/or modified sequence from HRSV(A2)__F0 (opt1)
aggagagucccgcagucggcguccagcggcucugcuuguucgugugugugucguugcaggccuuauucaagcuuaccauggagcugcucauccugaaggccaacgccaucaccaccauccugacggcggugaccuucugcuucgccagcggccagaacaucaccgaggaguucuaccaguccaccugcagcgccgucuccaagggguaccucagcgcccugcggacgggcugguacaccuccgugaucaccaucgagcugagcaacaucaaggagaacaagugcaacgggaccgacgccaaggugaagcucaucaagcaggagcuggacaaguacaagaacgcggucacggagcugcagcuccugaugcaguccaccccggcaaccaacaaccgcgcccggcgcgagcugccccgguucaugaacuacacccucaacaacgccaagaagacgaacgugacccugagcaagaagcgcaagcggcgcuuccugggcuuccuccugggggugggcuccgccaucgcgagcggcgucgccguguccaaggugcugcaccucgagggggaggucaacaagaucaagagcgcccugcuguccaccaacaaggccguggugagccucuccaacggcgucagcgugcugaccuccaaggugcuggaccucaagaacuacaucgacaagcagcugcugcccaucgucaacaagcagagcugcuccaucagcaacaucgagacggugaucgaguuccagcagaagaacaaccggcuccuggagaucacccgcgaguucagcgugaacgccggggucaccacccccguguccacguacaugcugaccaacagcgagcuccugucccugaucaacgacaugccgaucaccaacgaccagaagaagcucaugagcaacaacgugcagaucguccggcagcaguccuacagcaucauguccaucaucaaggaggaggugcuggcguacgugguccagcugccccucuacggcgugaucgacacccccugcuggaagcugcacacgagcccccugugcaccaccaacaccaaggagggguccaacaucugccucacgcgcaccgaccggggcugguacugcgacaacgccggcagcgucuccuucuucccgcaggccgagaccugcaaggugcagagcaaccgcguguucugcgacaccaugaacucccugacgcugcccagcgagguaaaccucugcaacgucgacaucuucaaccccaaguacgacugcaagaucaugaccuccaagaccgacgugagcuccagcgugaucaccucccugggggccaucgucagcugcuacggcaagacgaagugcaccgccagcaacaagaaccgggggaucaucaagaccuucuccaacggcugcgacuacgugagcaacaagggcguggacaccguguccgucgggaacacccuguacuacgugaacaagcaggagggcaagagccucuacgugaagggggagcccaucaucaacuucuacgacccgcuggucuuccccuccgacgaguucgacgcgagcaucucccaggugaacgagaagaucaaccagagccuggccuucauccgcaaguccgacgagcugcuccacaacgugaacgccggcaagagcacgaccaacaucaugaucaccaccaucaucaucgucaucaucgugauccugcugucccucaucgccguggggcugcugcucuacugcaaggcccggagcacgcccgucacccuguccaaggaccagcugagcggcaucaacaacaucgcguucuccaacugaggacuagucccuguucccagagcccacuuuuuuuucuuuuuuugaaauaaaauagccugucuuucagaucucaaaggcucuuuucagagccaccaaaaaaaaaaaaaaaaaaaaaaaaaaaaaaaaaaaaaaaaaaaaaaaaaaaaaaaaaaaaaaaaaaaaaaaaaaaaaaaaaaaaaaaaaaaaaaaaaaaaa

SEQ ID NO: 21416 - RNA, 1997 nt, Artificial Sequence
  mRNA product Design a-1 (hSL-A100) comprising derived and/or modified sequence from HRSV(A2)__F0 (opt1)
aggagagucccgcagucggcguccagcggcucugcuuguucgugugugugucguugcaggccuuauucaagcuuaccauggagcugcucauccugaaggccaacgccaucaccaccauccugacggcggugaccuucugcuucgccagcggccagaacaucaccgaggaguucuaccaguccacgugcagcgccgucuccaagggguaccucagcgcccugcgcaccggcugguacaccuccgugaucaccaucgagcugagcaacaucaaggagaacaagugcaacgggaccgacgccaaggugaagcucaucaagcaggagcuggacaaguacaagaacgcggucacggagcugcagcuccugaugcaguccacccccgccaccaacaaccgggcccgccgggagcugccgcgcuucaugaacuacacccucaacaacgccaagaagacgaacgugacccugagcaagaagcggaagcgccgguuccugggcuuccuccugggggugggcuccgcgaucgccagcggcgucgccguguccaaggugcugcaccucgagggggaggucaacaagaucaagagcgcccugcuguccaccaacaaggccguggugagccucuccaacggcgucagcgugcugaccuccaaggugcuggaccucaagaacuacaucgacaagcagcugcugcccaucgucaacaagcagagcugcuccaucagcaacaucgagacggugaucgaguuccagcagaagaacaaccgccuccuggagaucacccgggaguucagcgugaacgcgggggucaccacccccguguccacguacaugcugaccaacagcgagcuccugucccugaucaacgacaugcccaucaccaacgaccagaagaagcucaugagcaacaacgugcagaucguccgccagcaguccuacagcaucauguccaucaucaaggaggaggugcuggccuacgugguccagcugccgcucuacggcgugaucgacacccccugcuggaagcugcacacgagcccccugugcaccaccaacaccaaggagggguccaacaucugccucacgcggaccgaccgcggcugguacugcgacaacgccggcagcgucuccuucuucccccaggccgagaccugcaaggugcagagcaaccggguguucugcgacaccaugaacucccugacgcugccgagcgaggucaaccucugcaacguggacaucuucaaccccaaguacgacugcaagaucaugaccuccaagaccgacgugagcuccagcgucaucaccucccugggggccaucgugagcugcuacggcaagacgaagugcaccgcgagcaacaagaaccgcgggaucaucaagaccuucuccaacggcugcgacuacgugagcaacaagggcgucgacaccguguccguggggaacacccuguacuacgucaacaagcaggagggcaagagccucuacgugaagggggagcccaucaucaacuucuacgacccccugguguucccguccgacgaguucgacgccagcaucucccaggucaacgagaagaucaaccagagccuggccuucauccggaaguccgacgagcuccugcacaacgugaacgccggcaagagcacgaccaacaucaugaucaccaccaucaucaucgugaucaucgucauccugcugucccucaucgccguggggcugcugcucuacugcaaggcgcgcagcacgcccgugacccuguccaaggaccagcugagcggcaucaacaacaucgccuucuccaacugaggacuagucccuguucccagagcccacuuuuuuuucuuuuuuugaaauaaaauagccugucuuucagaucucaaaggcucuuuucagagccaccaaaaaaaaaaaaaaaaaaaaaaaaaaaaaaaaaaaaaaaaaaaaaaaaaaaaaaaaaaaaaaaaaaaaaaaaaaaaaaaaaaaaaaaaaaaaaaaaaaaaa

SEQ ID NO: 21417 - RNA, 1997 nt, Artificial Sequence
  mRNA product Design a-1 (hSL-A100) comprising derived and/or modified sequence from HRSV(A2)__F0 (opt1)
aggagagucccgcagucggcguccagcggcucugcuuguucgugugugugucguugcaggccuuauucaagcuuaccauggagcugcucauccugaaggccaacgccaucaccaccauccugacggcggugaccuucugcuucgccagcggccagaacaucaccgaggaguucuaccaguccacgugcagcgccgucuccaagggguaccucagcgcccugcgcaccggcugguacaccuccgugaucaccaucgagcugagcaacaucaaggagaacaagugcaacgggaccgacgccaaggugaagcucaucaagcaggagcuggacaaguacaagaacgcggucacggagcugcagcuccugaugcaguccacccccgccaccaacaaccgggcccgccgggagcugccgcgcuucaugaacuacacccucaacaacgccaagaagacgaacgugacccugagcaagaagcggaagcgccgguuccugggcuuccuccugggggugggcuccgcgaucgccagcggcgucgccguguccaaggugcugcaccucgagggggaggucaacaagaucaagagcgcccugcuguccaccaacaaggccguggugagccucuccaacggcgucagcgugcugaccuccaaggugcuggaccucaagaacuacaucgacaagcagcugcugcccaucgucaacaagcagagcugcuccaucagcaacaucgagacggugaucgaguuccagcagaagaacaaccgccuccuggagaucacccgggaguucagcgugaacgcgggggucaccacccccguguccacguacaugcugaccaacagcgagcuccugucccugaucaacgacaugcccaucaccaacgaccagaagaagcucaugagcaacaacgugcagaucguccgccagcaguccuacagcaucauguccaucaucaaggaggaggugcuggccuacgugguccagcugccgcucuacggcgugaucgacacccccugcuggaagcugcacacgagcccccugugcaccaccaacaccaaggagggguccaacaucugccucacgcggaccgaccgcggcugguacugcgacaacgccggcagcgucuccuucuucccccaggccgagaccugcaaggugcagagcaaccggguguucugcgacaccaugaacucccugacgcugccgagcgaggucaaccucugcaacguggacaucuucaaccccaaguacgacugcaagaucaugaccuccaagaccgacgugagcuccagcgucaucaccucccugggggccaucgugagcugcuacggcaagacgaagugcaccgcgagcaacaagaaccgcgggaucaucaagaccuucuccaacggcugcgacuacgugagcaacaagggcgucgacaccguguccguggggaacacccuguacuacgucaacaagcaggagggcaagagccucuacgugaagggggagcccaucaucaacuucuacgacccccugguguucccguccgacgaguucgacgccagcaucucccaggucaacgagaagaucaaccagagccuggccuucauccggaaguccgacgagcugcuccacaacgugaacgccggcaagagcacgaccaacaucaugaucaccaccaucaucaucgugaucaucgucauccugcugucccucaucgccguggggcugcugcucuacugcaaggcgcgcagcacgcccgugacccuguccaaggaccagcugagcggcaucaacaacaucgccuucuccaacugaggacuagucccuguucccagagcccacuuuuuuuucuuuuuuugaaauaaaauagccugucuuucagaucucaaaggcucuuuucagagccaccaaaaaaaaaaaaaaaaaaaaaaaaaaaaaaaaaaaaaaaaaaaaaaaaaaaaaaaaaaaaaaaaaaaaaaaaaaaaaaaaaaaaaaaaaaaaaaaaaaaaa

SEQ ID NO: 21418 - RNA, 1934 nt, Artificial Sequence
  mRNA product Design a-1 (hSL-A100) comprising derived and/or modified sequence from HRSV(A2)__F-del (opt1)
aggagagucccgcagucggcguccagcggcucugcuuguucgugugugugucguugcaggccuuauucaagcuuaccauggagcugcucauccugaaggccaacgccaucaccaccauccugacggcggugaccuucugcuucgccagcggccagaacaucaccgaggaguucuaccaguccaccugcagcgccgucuccaagggguaccucagcgcccugcggacgggcugguacaccuccgugaucaccaucgagcugagcaacaucaaggagaacaagugcaacgggaccgacgccaaggugaagcucaucaagcaggagcuggacaaguacaagaacgcggucacggagcugcagcuccugaugcaguccaccccggcaaccaacaaccgcgcccggcgcgagcugccccgguucaugaacuacacccucaacaacgccaagaagacgaacgugacccugagcaagaagcgcaagcggcgcuuccugggcuuccuccugggggugggcuccgccaucgcgagcggcgucgccguguccaaggugcugcaccucgagggggaggucaacaagaucaagagcgcccugcuguccaccaacaaggccguggugagccucuccaacggcgucagcgugcugaccuccaaggugcuggaccucaagaacuacaucgacaagcagcugcugcccaucgucaacaagcagagcugcuccaucagcaacaucgagacggugaucgaguuccagcagaagaacaaccggcuccuggagaucacccgcgaguucagcgugaacgccggggucaccacccccguguccacguacaugcugaccaacagcgagcuccugucccugaucaacgacaugccgaucaccaacgaccagaagaagcucaugagcaacaacgugcagaucguccggcagcaguccuacagcaucauguccaucaucaaggaggaggugcuggcguacgugguccagcugccccucuacggcgugaucgacacccccugcuggaagcugcacacgagcccccugugcaccaccaacaccaaggagggguccaacaucugccucacgcgcaccgaccggggcugguacugcgacaacgccggcagcgucuccuucuucccgcaggccgagaccugcaaggugcagagcaaccgcguguucugcgacaccaugaacucccugacgcugcccagcgagguaaaccucugcaacgucgacaucuucaaccccaaguacgacugcaagaucaugaccuccaagaccgacgugagcuccagcgugaucaccucccugggggccaucgucagcugcuacggcaagacgaagugcaccgccagcaacaagaaccgggggaucaucaagaccuucuccaacggcugcgacuacgugagcaacaagggcguggacaccguguccgucgggaacacccuguacuacgugaacaagcaggagggcaagagccucuacgugaagggggagcccaucaucaacuucuacgacccgcuggucuuccccuccgacgaguucgacgcgagcaucucccaggugaacgagaagaucaaccagagccuggccuucauccgcaaguccgacgagcugcuccacaacgugaacgccggcaagagcacgaccaacaucaugaucaccaccaucaucaucgucaucaucgugauccugcugucccucaucgccguggggcugcugcucuacugcaaggcccggugaggacuagucccuguucccagagcccacuuuuuuuucuuuuuuugaaauaaaauagccugucuuucagaucucaaaggcucuuuucagagccaccaaaaaaaaaaaaaaaaaaaaaaaaaaaaaaaaaaaaaaaaaaaaaaaaaaaaaaaaaaaaaaaaaaaaaaaaaaaaaaaaaaaaaaaaaaaaaaaaaaaaa

SEQ ID NO: 21419 - RNA, 1934 nt, Artificial Sequence
  mRNA product Design a-1 (hSL-A100) comprising derived and/or modified sequence from HRSV(A2)__F-del (opt1)
aggagagucccgcagucggcguccagcggcucugcuuguucgugugugugucguugcaggccuuauucaagcuuaccauggagcugcucauccugaaggccaacgccaucaccaccauccugacggcggugaccuucugcuucgccagcggccagaacaucaccgaggaguucuaccaguccacgugcagcgccgucuccaagggguaccucagcgcccugcgcaccggcugguacaccuccgugaucaccaucgagcugagcaacaucaaggagaacaagugcaacgggaccgacgccaaggugaagcucaucaagcaggagcuggacaaguacaagaacgcggucacggagcugcagcuccugaugcaguccacccccgccaccaacaaccgggcccgccgggagcugccgcgcuucaugaacuacacccucaacaacgccaagaagacgaacgugacccugagcaagaagcggaagcgccgguuccugggcuuccuccugggggugggcuccgcgaucgccagcggcgucgccguguccaaggugcugcaccucgagggggaggucaacaagaucaagagcgcccugcuguccaccaacaaggccguggugagccucuccaacggcgucagcgugcugaccuccaaggugcuggaccucaagaacuacaucgacaagcagcugcugcccaucgucaacaagcagagcugcuccaucagcaacaucgagacggugaucgaguuccagcagaagaacaaccgccuccuggagaucacccgggaguucagcgugaacgcgggggucaccacccccguguccacguacaugcugaccaacagcgagcuccugucccugaucaacgacaugcccaucaccaacgaccagaagaagcucaugagcaacaacgugcagaucguccgccagcaguccuacagcaucauguccaucaucaaggaggaggugcuggccuacgugguccagcugccgcucuacggcgugaucgacacccccugcuggaagcugcacacgagcccccugugcaccaccaacaccaaggagggguccaacaucugccucacgcggaccgaccgcggcugguacugcgacaacgccggcagcgucuccuucuucccccaggccgagaccugcaaggugcagagcaaccggguguucugcgacaccaugaacucccugacgcugccgagcgaggucaaccucugcaacguggacaucuucaaccccaaguacgacugcaagaucaugaccuccaagaccgacgugagcuccagcgucaucaccucccugggggccaucgugagcugcuacggcaagacgaagugcaccgcgagcaacaagaaccgcgggaucaucaagaccuucuccaacggcugcgacuacgugagcaacaagggcgucgacaccguguccguggggaacacccuguacuacgucaacaagcaggagggcaagagccucuacgugaagggggagcccaucaucaacuucuacgacccccugguguucccguccgacgaguucgacgccagcaucucccaggucaacgagaagaucaaccagagccuggccuucauccggaaguccgacgagcuccugcacaacgugaacgccggcaagagcacgaccaacaucaugaucaccaccaucaucaucgugaucaucgucauccugcugucccucaucgccguggggcugcugcucuacugcaaggcgcgcugaggacuagucccuguucccagagcccacuuuuuuuucuuuuuuugaaauaaaauagccugucuuucagaucucaaaggcucuuuucagagccaccaaaaaaaaaaaaaaaaaaaaaaaaaaaaaaaaaaaaaaaaaaaaaaaaaaaaaaaaaaaaaaaaaaaaaaaaaaaaaaaaaaaaaaaaaaaaaaaaaaaaa

SEQ ID NO: 21420 - RNA, 1934 nt, Artificial Sequence
  mRNA product Design a-1 (hSL-A100) comprising derived and/or modified sequence from HRSV(A2)__F-del (opt1)
aggagagucccgcagucggcguccagcggcucugcuuguucgugugugugucguugcaggccuuauucaagcuuaccauggagcugcucauccugaaggccaacgccaucaccaccauccugacggcggugaccuucugcuucgccagcggccagaacaucaccgaggaguucuaccaguccacgugcagcgccgucuccaagggguaccucagcgcccugcgcaccggcugguacaccuccgugaucaccaucgagcugagcaacaucaaggagaacaagugcaacgggaccgacgccaaggugaagcucaucaagcaggagcuggacaaguacaagaacgcggucacggagcugcagcuccugaugcaguccacccccgccaccaacaaccgggcccgccgggagcugccgcgcuucaugaacuacacccucaacaacgccaagaagacgaacgugacccugagcaagaagcggaagcgccgguuccugggcuuccuccugggggugggcuccgcgaucgccagcggcgucgccguguccaaggugcugcaccucgagggggaggucaacaagaucaagagcgcccugcuguccaccaacaaggccguggugagccucuccaacggcgucagcgugcugaccuccaaggugcuggaccucaagaacuacaucgacaagcagcugcugcccaucgucaacaagcagagcugcuccaucagcaacaucgagacggugaucgaguuccagcagaagaacaaccgccuccuggagaucacccgggaguucagcgugaacgcgggggucaccacccccguguccacguacaugcugaccaacagcgagcuccugucccugaucaacgacaugcccaucaccaacgaccagaagaagcucaugagcaacaacgugcagaucguccgccagcaguccuacagcaucauguccaucaucaaggaggaggugcuggccuacgugguccagcugccgcucuacggcgugaucgacacccccugcuggaagcugcacacgagcccccugugcaccaccaacaccaaggagggguccaacaucugccucacgcggaccgaccgcggcugguacugcgacaacgccggcagcgucuccuucuucccccaggccgagaccugcaaggugcagagcaaccggguguucugcgacaccaugaacucccugacgcugccgagcgaggucaaccucugcaacguggacaucuucaaccccaaguacgacugcaagaucaugaccuccaagaccgacgugagcuccagcgucaucaccucccugggggccaucgugagcugcuacggcaagacgaagugcaccgcgagcaacaagaaccgcgggaucaucaagaccuucuccaacggcugcgacuacgugagcaacaagggcgucgacaccguguccguggggaacacccuguacuacgucaacaagcaggagggcaagagccucuacgugaagggggagcccaucaucaacuucuacgacccccugguguucccguccgacgaguucgacgccagcaucucccaggucaacgagaagaucaaccagagccuggccuucauccggaaguccgacgagcugcuccacaacgugaacgccggcaagagcacgaccaacaucaugaucaccaccaucaucaucgugaucaucgucauccugcugucccucaucgccguggggcugcugcucuacugcaaggcgcgcugaggacuagucccuguucccagagcccacuuuuuuuucuuuuuuugaaauaaaauagccugucuuucagaucucaaaggcucuuuucagagccaccaaaaaaaaaaaaaaaaaaaaaaaaaaaaaaaaaaaaaaaaaaaaaaaaaaaaaaaaaaaaaaaaaaaaaaaaaaaaaaaaaaaaaaaaaaaaaaaaaaaaa

SEQ ID NO: 21421 - RNA, 1997 nt, Artificial Sequence
  mRNA product Design a-1 (hSL-A100) comprising derived and/or modified sequence from HRSV(A2)__F0_DSCav1 (opt1)
aggagagucccgcagucggcguccagcggcucugcuuguucgugugugugucguugcaggccuuauucaagcuuaccauggagcugcucauccugaaggccaacgccaucaccaccauccugacggcggugaccuucugcuucgccagcggccagaacaucaccgaggaguucuaccaguccacgugcagcgccgucuccaagggguaccucagcgcccugcggaccggcugguacaccuccgugaucaccaucgagcugagcaacaucaaggagaacaagugcaacgggaccgacgccaaggugaagcucaucaagcaggagcuggacaaguacaagaacgcggucacggagcugcagcuccugaugcaguccaccccggcaaccaacaaccgcgcccggcgcgagcugccccgguucaugaacuacacccucaacaacgccaagaagacgaacgugacccugagcaagaagcgcaagcggcgcuuccugggcuuccuccugggggugggcuccgccaucgcgagcggcgucgccgugugcaaggugcugcaccucgagggggaggucaacaagaucaagagcgcccugcuguccaccaacaaggccguggugagccucuccaacggcgucagcgugcugaccuucaaggugcuggaccucaagaacuacaucgacaagcagcugcugcccauccugaacaagcagagcugcuccaucagcaacaucgagacggugaucgaguuccagcagaagaacaaccggcuccuggagaucacccgcgaguucagcgugaacgccggggucaccacccccguguccacguacaugcugaccaacagcgagcuccugucccugaucaacgacaugccgaucaccaacgaccagaagaagcucaugagcaacaacgugcagaucguccggcagcaguccuacagcaucaugugcaucaucaaggaggaggugcuggcguacgugguccagcugccccucuacggcgugaucgacacccccugcuggaagcugcacacgagcccccugugcaccaccaacaccaaggagggguccaacaucugccucacgcgcaccgaccggggcugguacugcgacaacgccggcagcgucuccuucuucccgcaggccgagaccugcaaggugcagagcaaccgcguguucugcgacaccaugaacucccugacgcugcccagcgagguaaaccucugcaacgucgacaucuucaaccccaaguacgacugcaagaucaugaccuccaagaccgacgugagcuccagcgugaucaccucccugggggccaucgucagcugcuacggcaagacgaagugcaccgccagcaacaagaaccgggggaucaucaagaccuucuccaacggcugcgacuacgugagcaacaagggcguggacaccguguccgucgggaacacccuguacuacgugaacaagcaggagggcaagagccucuacgugaagggggagcccaucaucaacuucuacgacccgcuggucuuccccuccgacgaguucgacgcgagcaucucccaggugaacgagaagaucaaccagagccuggccuucauccgcaaguccgacgagcugcuccacaacgugaacgccggcaagagcacgaccaacaucaugaucaccaccaucaucaucgucaucaucgugauccugcugucccucaucgccguggggcugcugcucuacugcaaggcccggagcacgcccgucacccuguccaaggaccagcugagcggcaucaacaacaucgcguucuccaacugaggacuagucccuguucccagagcccacuuuuuuuucuuuuuuugaaauaaaauagccugucuuucagaucucaaaggcucuuuucagagccaccaaaaaaaaaaaaaaaaaaaaaaaaaaaaaaaaaaaaaaaaaaaaaaaaaaaaaaaaaaaaaaaaaaaaaaaaaaaaaaaaaaaaaaaaaaaaaaaaaaaaa

SEQ ID NO: 21422 - RNA, 1997 nt, Artificial Sequence
  mRNA product Design a-1 (hSL-A100) comprising derived and/or modified sequence from HRSV(A2)__F0_DSCav1 (opt1)
aggagagucccgcagucggcguccagcggcucugcuuguucgugugugugucguugcaggccuuauucaagcuuaccauggagcugcucauccugaaggccaacgccaucaccaccauccugacggcggugaccuucugcuucgccagcggccagaacaucaccgaggaguucuaccaguccacgugcagcgccgucuccaagggguaccucagcgcccugcgcaccggcugguacaccuccgugaucaccaucgagcugagcaacaucaaggagaacaagugcaacgggaccgacgccaaggugaagcucaucaagcaggagcuggacaaguacaagaacgcggucacggagcugcagcuccugaugcaguccacccccgccaccaacaaccgggcccgccgggagcugccgcgcuucaugaacuacacccucaacaacgccaagaagacgaacgugacccugagcaagaagcggaagcgccgguuccugggcuuccuccugggggugggcuccgcgaucgccagcggcgucgccgugugcaaggugcugcaccucgagggggaggucaacaagaucaaguccgcccugcugagcaccaacaaggccguggugucccucagcaacggcgucuccgugcugaccuucaaggugcuggaccucaagaacuacaucgacaagcagcugcugcccauccucaacaagcagagcugcuccaucagcaacaucgagacggucaucgaguuccagcagaagaacaaccgccugcuggagaucacccgggaguucuccgugaacgcgggggugaccacccccgucagcacguacaugcucaccaacagcgagcugcugucccucaucaacgacaugcccaucaccaacgaccagaagaagcugaugagcaacaacgugcagaucgugcgccagcaguccuacagcaucaugugcaucaucaaggaggagguccuggccuacguggugcagcucccgcuguacggcgucaucgacacccccugcuggaagcugcacacgagcccccucugcaccaccaacaccaaggaggggagcaacaucugccugacgcggaccgaccgcggcugguacugcgacaacgccggcuccgugagcuucuucccccaggccgagaccugcaagguccaguccaaccggguguucugcgacaccaugaacagccugacgcucccguccgaggugaaccugugcaacgucgacaucuucaaccccaaguacgacugcaagaucaugaccagcaagaccgacguguccagcuccgugaucaccagccugggggccaucgucuccugcuacggcaagacgaagugcaccgcgagcaacaagaaccgcgggaucaucaagaccuucuccaacggcugcgacuacgugagcaacaagggcguggacaccgucagcguggggaacacccucuacuacgugaacaagcaggagggcaagucccuguacgucaagggggagcccaucaucaacuucuacgacccccugguguucccgagcgacgaguucgacgccuccaucagccaggugaacgagaagaucaaccagucccucgccuucauccggaaguccgacgagcugcugcacaacgucaacgccggcaaguccacgaccaacaucaugaucaccaccaucaucaucgugaucaucgugauccugcucagccugaucgccgucgggcugcuccuguacugcaaggcgcgcuccacgcccgugacccugagcaaggaccagcucuccggcaucaacaacaucgccuucagcaacugaggacuagucccuguucccagagcccacuuuuuuuucuuuuuuugaaauaaaauagccugucuuucagaucucaaaggcucuuuucagagccaccaaaaaaaaaaaaaaaaaaaaaaaaaaaaaaaaaaaaaaaaaaaaaaaaaaaaaaaaaaaaaaaaaaaaaaaaaaaaaaaaaaaaaaaaaaaaaaaaaaaaa

SEQ ID NO: 21423 - RNA, 1997 nt, Artificial Sequence
  mRNA product Design a-1 (hSL-A100) comprising derived and/or modified sequence from HRSV(A2)__F0_DSCav1 (opt1)
aggagagucccgcagucggcguccagcggcucugcuuguucgugugugugucguugcaggccuuauucaagcuuaccauggagcugcucauccugaaggccaacgccaucaccaccauccugacggcggugaccuucugcuucgccagcggccagaacaucaccgaggaguucuaccaguccacgugcagcgccgucuccaagggguaccucagcgcccugcgcaccggcugguacaccuccgugaucaccaucgagcugagcaacaucaaggagaacaagugcaacgggaccgacgccaaggugaagcucaucaagcaggagcuggacaaguacaagaacgcggucacggagcugcagcuccugaugcaguccacccccgccaccaacaaccgggcccgccgggagcugccgcgcuucaugaacuacacccucaacaacgccaagaagacgaacgugacccugagcaagaagcggaagcgccgguuccugggcuuccuccugggggugggcuccgcgaucgccagcggcgucgccgugugcaaggugcugcaccucgagggggaggucaacaagaucaaguccgcccugcugagcaccaacaaggccguggugucccucagcaacggcgucuccgugcugaccuucaaggugcuggaccucaagaacuacaucgacaagcagcugcugcccauccucaacaagcagagcugcuccaucagcaacaucgagacggucaucgaguuccagcagaagaacaaccgccugcuggagaucacccgggaguucuccgugaacgcgggggugaccacccccgucagcacguacaugcucaccaacagcgagcugcugucccucaucaacgacaugcccaucaccaacgaccagaagaagcugaugagcaacaacgugcagaucgugcgccagcaguccuacagcaucaugugcaucaucaaggaggagguccuggccuacguggugcagcucccgcuguacggcgucaucgacacccccugcuggaagcugcacacgagcccccucugcaccaccaacaccaaggaggggagcaacaucugccugacgcggaccgaccgcggcugguacugcgacaacgccggcuccgugagcuucuucccccaggccgagaccugcaagguccaguccaaccggguguucugcgacaccaugaacagccugacgcucccguccgaggugaaccugugcaacgucgacaucuucaaccccaaguacgacugcaagaucaugaccagcaagaccgacguguccagcuccgugaucaccagccugggggccaucgucuccugcuacggcaagacgaagugcaccgcgagcaacaagaaccgcgggaucaucaagaccuucuccaacggcugcgacuacgugagcaacaagggcguggacaccgucagcguggggaacacccucuacuacgugaacaagcaggagggcaagucccuguacgucaagggggagcccaucaucaacuucuacgacccccugguguucccgagcgacgaguucgacgccuccaucagccaggugaacgagaagaucaaccagucccuggccuucauccggaaguccgacgagcuccugcacaacgucaacgccggcaaguccacgaccaacaucaugaucaccaccaucaucaucgugaucaucgugauccugcucagccugaucgccgucgggcugcuccuguacugcaaggcgcgcuccacgcccgugacccugagcaaggaccagcucuccggcaucaacaacaucgccuucagcaacugaggacuagucccuguucccagagcccacuuuuuuuucuuuuuuugaaauaaaauagccugucuuucagaucucaaaggcucuuuucagagccaccaaaaaaaaaaaaaaaaaaaaaaaaaaaaaaaaaaaaaaaaaaaaaaaaaaaaaaaaaaaaaaaaaaaaaaaaaaaaaaaaaaaaaaaaaaaaaaaaaaaaa

SEQ ID NO: 21424 - RNA, 1934 nt, Artificial Sequence
  mRNA product Design a-1 (hSL-A100) comprising derived and/or modified sequence from HRSV(A2)__F-del_DSCav1 (opt1)
aggagagucccgcagucggcguccagcggcucugcuuguucgugugugugucguugcaggccuuauucaagcuuaccauggagcugcucauccugaaggccaacgccaucaccaccauccugacggcggugaccuucugcuucgccagcggccagaacaucaccgaggaguucuaccaguccacgugcagcgccgucuccaagggguaccucagcgcccugcggaccggcugguacaccuccgugaucaccaucgagcugagcaacaucaaggagaacaagugcaacgggaccgacgccaaggugaagcucaucaagcaggagcuggacaaguacaagaacgcggucacggagcugcagcuccugaugcaguccaccccggcaaccaacaaccgcgcccggcgcgagcugccccgguucaugaacuacacccucaacaacgccaagaagacgaacgugacccugagcaagaagcgcaagcggcgcuuccugggcuuccuccugggggugggcuccgccaucgcgagcggcgucgccgugugcaaggugcugcaccucgagggggaggucaacaagaucaagagcgcccugcuguccaccaacaaggccguggugagccucuccaacggcgucagcgugcugaccuucaaggugcuggaccucaagaacuacaucgacaagcagcugcugcccauccugaacaagcagagcugcuccaucagcaacaucgagacggugaucgaguuccagcagaagaacaaccggcuccuggagaucacccgcgaguucagcgugaacgccggggucaccacccccguguccacguacaugcugaccaacagcgagcuccugucccugaucaacgacaugccgaucaccaacgaccagaagaagcucaugagcaacaacgugcagaucguccggcagcaguccuacagcaucaugugcaucaucaaggaggaggugcuggcguacgugguccagcugccccucuacggcgugaucgacacccccugcuggaagcugcacacgagcccccugugcaccaccaacaccaaggagggguccaacaucugccucacgcgcaccgaccggggcugguacugcgacaacgccggcagcgucuccuucuucccgcaggccgagaccugcaaggugcagagcaaccgcguguucugcgacaccaugaacucccugacgcugcccagcgagguaaaccucugcaacgucgacaucuucaaccccaaguacgacugcaagaucaugaccuccaagaccgacgugagcuccagcgugaucaccucccugggggccaucgucagcugcuacggcaagacgaagugcaccgccagcaacaagaaccgggggaucaucaagaccuucuccaacggcugcgacuacgugagcaacaagggcguggacaccguguccgucgggaacacccuguacuacgugaacaagcaggagggcaagagccucuacgugaagggggagcccaucaucaacuucuacgacccgcuggucuuccccuccgacgaguucgacgcgagcaucucccaggugaacgagaagaucaaccagagccuggccuucauccgcaaguccgacgagcugcuccacaacgugaacgccggcaagagcacgaccaacaucaugaucaccaccaucaucaucgucaucaucgugauccugcugucccucaucgccguggggcugcugcucuacugcaaggcccggugaggacuagucccuguucccagagcccacuuuuuuuucuuuuuuugaaauaaaauagccugucuuucagaucucaaaggcucuuuucagagccaccaaaaaaaaaaaaaaaaaaaaaaaaaaaaaaaaaaaaaaaaaaaaaaaaaaaaaaaaaaaaaaaaaaaaaaaaaaaaaaaaaaaaaaaaaaaaaaaaaaaaa

SEQ ID NO: 21425 - RNA, 1934 nt, Artificial Sequence
  mRNA product Design a-1 (hSL-A100) comprising derived and/or modified sequence from HRSV(A2)__F-del_DSCav1 (opt1)
aggagagucccgcagucggcguccagcggcucugcuuguucgugugugugucguugcaggccuuauucaagcuuaccauggagcugcucauccugaaggccaacgccaucaccaccauccugacggcggugaccuucugcuucgccagcggccagaacaucaccgaggaguucuaccaguccacgugcagcgccgucuccaagggguaccucagcgcccugcgcaccggcugguacaccuccgugaucaccaucgagcugagcaacaucaaggagaacaagugcaacgggaccgacgccaaggugaagcucaucaagcaggagcuggacaaguacaagaacgcggucacggagcugcagcuccugaugcaguccacccccgccaccaacaaccgggcccgccgggagcugccgcgcuucaugaacuacacccucaacaacgccaagaagacgaacgugacccugagcaagaagcggaagcgccgguuccugggcuuccuccugggggugggcuccgcgaucgccagcggcgucgccgugugcaaggugcugcaccucgagggggaggucaacaagaucaaguccgcccugcugagcaccaacaaggccguggugucccucagcaacggcgucuccgugcugaccuucaaggugcuggaccucaagaacuacaucgacaagcagcugcugcccauccucaacaagcagagcugcuccaucagcaacaucgagacggucaucgaguuccagcagaagaacaaccgccugcuggagaucacccgggaguucuccgugaacgcgggggugaccacccccgucagcacguacaugcucaccaacagcgagcugcugucccucaucaacgacaugcccaucaccaacgaccagaagaagcugaugagcaacaacgugcagaucgugcgccagcaguccuacagcaucaugugcaucaucaaggaggagguccuggccuacguggugcagcucccgcuguacggcgucaucgacacccccugcuggaagcugcacacgagcccccucugcaccaccaacaccaaggaggggagcaacaucugccugacgcggaccgaccgcggcugguacugcgacaacgccggcuccgugagcuucuucccccaggccgagaccugcaagguccaguccaaccggguguucugcgacaccaugaacagccugacgcucccguccgaggugaaccugugcaacgucgacaucuucaaccccaaguacgacugcaagaucaugaccagcaagaccgacguguccagcuccgugaucaccagccugggggccaucgucuccugcuacggcaagacgaagugcaccgcgagcaacaagaaccgcgggaucaucaagaccuucuccaacggcugcgacuacgugagcaacaagggcguggacaccgucagcguggggaacacccucuacuacgugaacaagcaggagggcaagucccuguacgucaagggggagcccaucaucaacuucuacgacccccugguguucccgagcgacgaguucgacgccuccaucagccaggugaacgagaagaucaaccagucccucgccuucauccggaaguccgacgagcugcugcacaacgucaacgccggcaaguccacgaccaacaucaugaucaccaccaucaucaucgugaucaucgugauccugcucagccugaucgccgucgggcugcuccuguacugcaaggcgcgcugaggacuagucccuguucccagagcccacuuuuuuuucuuuuuuugaaauaaaauagccugucuuucagaucucaaaggcucuuuucagagccaccaaaaaaaaaaaaaaaaaaaaaaaaaaaaaaaaaaaaaaaaaaaaaaaaaaaaaaaaaaaaaaaaaaaaaaaaaaaaaaaaaaaaaaaaaaaaaaaaaaaaa

SEQ ID NO: 21426 - RNA, 1934 nt, Artificial Sequence
  mRNA product Design a-1 (hSL-A100) comprising derived and/or modified sequence from HRSV(A2)__F-del_DSCav1 (opt1)
aggagagucccgcagucggcguccagcggcucugcuuguucgugugugugucguugcaggccuuauucaagcuuaccauggagcugcucauccugaaggccaacgccaucaccaccauccugacggcggugaccuucugcuucgccagcggccagaacaucaccgaggaguucuaccaguccacgugcagcgccgucuccaagggguaccucagcgcccugcgcaccggcugguacaccuccgugaucaccaucgagcugagcaacaucaaggagaacaagugcaacgggaccgacgccaaggugaagcucaucaagcaggagcuggacaaguacaagaacgcggucacggagcugcagcuccugaugcaguccacccccgccaccaacaaccgggcccgccgggagcugccgcgcuucaugaacuacacccucaacaacgccaagaagacgaacgugacccugagcaagaagcggaagcgccgguuccugggcuuccuccugggggugggcuccgcgaucgccagcggcgucgccgugugcaaggugcugcaccucgagggggaggucaacaagaucaaguccgcccugcugagcaccaacaaggccguggugucccucagcaacggcgucuccgugcugaccuucaaggugcuggaccucaagaacuacaucgacaagcagcugcugcccauccucaacaagcagagcugcuccaucagcaacaucgagacggucaucgaguuccagcagaagaacaaccgccugcuggagaucacccgggaguucuccgugaacgcgggggugaccacccccgucagcacguacaugcucaccaacagcgagcugcugucccucaucaacgacaugcccaucaccaacgaccagaagaagcugaugagcaacaacgugcagaucgugcgccagcaguccuacagcaucaugugcaucaucaaggaggagguccuggccuacguggugcagcucccgcuguacggcgucaucgacacccccugcuggaagcugcacacgagcccccucugcaccaccaacaccaaggaggggagcaacaucugccugacgcggaccgaccgcggcugguacugcgacaacgccggcuccgugagcuucuucccccaggccgagaccugcaagguccaguccaaccggguguucugcgacaccaugaacagccugacgcucccguccgaggugaaccugugcaacgucgacaucuucaaccccaaguacgacugcaagaucaugaccagcaagaccgacguguccagcuccgugaucaccagccugggggccaucgucuccugcuacggcaagacgaagugcaccgcgagcaacaagaaccgcgggaucaucaagaccuucuccaacggcugcgacuacgugagcaacaagggcguggacaccgucagcguggggaacacccucuacuacgugaacaagcaggagggcaagucccuguacgucaagggggagcccaucaucaacuucuacgacccccugguguucccgagcgacgaguucgacgccuccaucagccaggugaacgagaagaucaaccagucccuggccuucauccggaaguccgacgagcuccugcacaacgucaacgccggcaaguccacgaccaacaucaugaucaccaccaucaucaucgugaucaucgugauccugcucagccugaucgccgucgggcugcuccuguacugcaaggcgcgcugaggacuagucccuguucccagagcccacuuuuuuuucuuuuuuugaaauaaaauagccugucuuucagaucucaaaggcucuuuucagagccaccaaaaaaaaaaaaaaaaaaaaaaaaaaaaaaaaaaaaaaaaaaaaaaaaaaaaaaaaaaaaaaaaaaaaaaaaaaaaaaaaaaaaaaaaaaaaaaaaaaaaa

SEQ ID NO: 21427 - RNA, 1880 nt, Artificial Sequence
  mRNA product Design a-1 (hSL-A100) comprising derived and/or modified sequence from HRSV(A2)__F_DSCav1_mut0 (opt1)
aggagagucccgcagucggcguccagcggcucugcuuguucgugugugugucguugcaggccuuauucaagcuuaccauggagcugcucauccugaaggccaacgccaucaccaccauccugacggcggugaccuucugcuucgccagcggccagaacaucaccgaggaguucuaccaguccacgugcagcgccgucuccaagggguaccucagcgcccugcggaccggcugguacaccuccgugaucaccaucgagcugagcaacaucaaggagaacaagugcaacgggaccgacgccaaggugaagcucaucaagcaggagcuggacaaguacaagaacgcggucacggagcugcagcuccugaugcaguccaccccggcaaccggcuccggcuccgccaucgcgagcggcgucgccgugugcaaggugcugcaccucgagggggaggucaacaagaucaagagcgcccugcuguccaccaacaaggccguggugagccucuccaacggcgucagcgugcugaccuucaaggugcuggaccucaagaacuacaucgacaagcagcugcugcccauccugaacaagcagagcugcuccaucagcaacaucgagacggugaucgaguuccagcagaagaacaaccggcuccuggagaucacccgcgaguucagcgugaacgccggggucaccacccccguguccacguacaugcugaccaacagcgagcuccugucccugaucaacgacaugccgaucaccaacgaccagaagaagcucaugagcaacaacgugcagaucguccggcagcaguccuacagcaucaugugcaucaucaaggaggaggugcuggcguacgugguccagcugccccucuacggcgugaucgacacccccugcuggaagcugcacacgagcccccugugcaccaccaacaccaaggagggguccaacaucugccucacgcgcaccgaccggggcugguacugcgacaacgccggcagcgucuccuucuucccgcaggccgagaccugcaaggugcagagcaaccgcguguucugcgacaccaugaacucccggacgcugcccagcgagguaaaccucugcaacgucgacaucuucaaccccaaguacgacugcaagaucaugaccuccaagaccgacgugagcuccagcgugaucaccucccugggggccaucgucagcugcuacggcaagacgaagugcaccgccagcaacaagaaccgggggaucaucaagaccuucuccaacggcugcgacuacgugagcaacaagggcguggacaccguguccgucgggaacacccuguacuacgugaacaagcaggagggcaagagccucuacgugaagggggagcccaucaucaacuucuacgacccgcuggucuuccccuccgacgaguucgacgcgagcaucucccaggugaacgagaagaucaaccagagccuggccuucauccgcaaguccgacgagcugcuccacaacgugaacgccggcaagagcacgaccaacaucaugaucaccaccaucaucaucgucaucaucgugauccugcugucccucaucgccguggggcugcugcucuacugcaaggcccggagcacgcccgucacccuguccaaggaccagcugagcggcaucaacaacaucgcguucuccaacugaggacuagucccuguucccagagcccacuuuuuuuucuuuuuuugaaauaaaauagccugucuuucagaucucaaaggcucuuuucagagccaccaaaaaaaaaaaaaaaaaaaaaaaaaaaaaaaaaaaaaaaaaaaaaaaaaaaaaaaaaaaaaaaaaaaaaaaaaaaaaaaaaaaaaaaaaaaaaaaaaaaaa

SEQ ID NO: 21428 - RNA, 1880 nt, Artificial Sequence
  mRNA product Design a-1 (hSL-A100) comprising derived and/or modified sequence from HRSV(A2)__F_DSCav1_mut0 (opt1)
aggagagucccgcagucggcguccagcggcucugcuuguucgugugugugucguugcaggccuuauucaagcuuaccauggagcugcucauccugaaggccaacgccaucaccaccauccugacggcggugaccuucugcuucgccagcggccagaacaucaccgaggaguucuaccaguccacgugcagcgccgucuccaagggguaccucagcgcccugcgcaccggcugguacaccuccgugaucaccaucgagcugagcaacaucaaggagaacaagugcaacgggaccgacgccaaggugaagcucaucaagcaggagcuggacaaguacaagaacgcggucacggagcugcagcuccugaugcaguccacccccgccaccggcagcggguccgccaucgccagcggcguggcggugugcaagguccugcaccucgagggcgaggugaacaagaucaaguccgcccugcugagcaccaacaaggccguggucucccucagcaacgggguguccgugcugacguucaagguccuggaccucaagaacuacaucgacaagcagcugcugccgauccucaacaagcagagcugcuccaucagcaacaucgagaccgugaucgaguuccagcagaagaacaaccggcugcuggagaucacccgcgaguucuccgugaacgccggcgucaccacgcccgugagcaccuacaugcucaccaacagcgagcugcugucccucaucaacgacaugcccaucaccaacgaccagaagaagcugaugagcaacaacgugcagaucguccggcagcaguccuacagcaucaugugcaucaucaaggaggaggugcuggccuacgugguccagcucccccuguacggggugaucgacacgccgugcuggaagcugcacaccagcccccucugcaccaccaacacgaaggagggcuccaacaucugccugacccgcaccgaccgggggugguacugcgacaacgcgggcuccgugagcuucuucccccaggccgagaccugcaagguccaguccaaccgcguguucugcgacacgaugaacagccggacccuccccuccgaggucaaccugugcaacguggacaucuucaacccgaaguacgacugcaagaucaugaccagcaagaccgacguguccagcuccgucaucacgagccugggcgccaucguguccugcuacgggaagaccaagugcaccgccagcaacaagaaccggggcaucaucaagaccuucuccaacgggugcgacuacgugagcaacaagggcgucgacacggugagcgugggcaacacccucuacuacgucaacaagcaggaggggaagucccuguacgugaagggcgagcccaucaucaacuucuacgacccccugguguuccccagcgacgaguucgacgccuccaucagccaggucaacgagaagaucaaccagucccucgcguucauccgcaagagcgacgagcugcugcacaacgugaacgccgggaaguccaccaccaacaucaugaucaccacgaucaucaucgugaucaucgucauccuccugagccugaucgccgugggccuccugcuguacugcaaggcccgguccaccccggugacccugagcaaggaccagcucuccgggaucaacaacaucgccuucagcaacugaggacuagucccuguucccagagcccacuuuuuuuucuuuuuuugaaauaaaauagccugucuuucagaucucaaaggcucuuuucagagccaccaaaaaaaaaaaaaaaaaaaaaaaaaaaaaaaaaaaaaaaaaaaaaaaaaaaaaaaaaaaaaaaaaaaaaaaaaaaaaaaaaaaaaaaaaaaaaaaaaaaaa

SEQ ID NO: 21429 - RNA, 1880 nt, Artificial Sequence
  mRNA product Design a-1 (hSL-A100) comprising derived and/or modified sequence from HRSV(A2)__F_DSCav1_mut0 (opt1)
aggagagucccgcagucggcguccagcggcucugcuuguucgugugugugucguugcaggccuuauucaagcuuaccauggagcugcucauccugaaggccaacgccaucaccaccauccugacggcggugaccuucugcuucgccagcggccagaacaucaccgaggaguucuaccaguccacgugcagcgccgucuccaagggguaccucagcgcccugcgcaccggcugguacaccuccgugaucaccaucgagcugagcaacaucaaggagaacaagugcaacgggaccgacgccaaggugaagcucaucaagcaggagcuggacaaguacaagaacgcggucacggagcugcagcuccugaugcaguccacccccgccaccggcagcggguccgccaucgccagcggcguggcggugugcaagguccugcaccucgagggcgaggugaacaagaucaaguccgcccugcugagcaccaacaaggccguggucucccucagcaacgggguguccgugcugacguucaagguccuggaccucaagaacuacaucgacaagcagcugcugccgauccucaacaagcagagcugcuccaucagcaacaucgagaccgugaucgaguuccagcagaagaacaaccggcugcuggagaucacccgcgaguucuccgugaacgccggcgucaccacgcccgugagcaccuacaugcucaccaacagcgagcugcugucccucaucaacgacaugcccaucaccaacgaccagaagaagcugaugagcaacaacgugcagaucguccggcagcaguccuacagcaucaugugcaucaucaaggaggaggugcuggccuacgugguccagcucccccuguacggggugaucgacacgccgugcuggaagcugcacaccagcccccucugcaccaccaacacgaaggagggcagcaacaucugccugacccgcaccgaccgggggugguacugcgacaacgcgggcuccgugagcuucuucccccaggccgagaccugcaagguccaguccaaccgcguguucugcgacacgaugaacagccggacccugcccuccgaggucaaccucugcaacguggacaucuucaacccgaaguacgacugcaagaucaugaccagcaagaccgacguguccagcuccgucaucacgagccugggcgccaucguguccugcuacgggaagaccaagugcaccgccagcaacaagaaccgcggcaucaucaagaccuucuccaacgggugcgacuacgugagcaacaagggcgucgacacggugagcgugggcaacacccuguacuacgucaacaagcaggaggggaagucccucuacgugaagggcgagcccaucaucaacuucuacgacccccugguguuccccagcgacgaguucgacgccuccaucagccaggucaacgagaagaucaaccagucccuggcguucauccggaaguccgacgagcuccugcacaacgugaacgccgggaaguccaccaccaacaucaugaucaccacgaucaucaucgugaucaucgucauccugcucagccugaucgccgugggccugcugcucuacugcaaggcccgcuccaccccggugacccugagcaaggaccagcuguccgggaucaacaacaucgccuucagcaacugaggacuagucccuguucccagagcccacuuuuuuuucuuuuuuugaaauaaaauagccugucuuucagaucucaaaggcucuuuucagagccaccaaaaaaaaaaaaaaaaaaaaaaaaaaaaaaaaaaaaaaaaaaaaaaaaaaaaaaaaaaaaaaaaaaaaaaaaaaaaaaaaaaaaaaaaaaaaaaaaaaaaa

SEQ ID NO: 21430 - RNA, 1817 nt, Artificial Sequence
  mRNA product Design a-1 (hSL-A100) comprising derived and/or modified sequence from HRSV(A2)__F-del_DSCav1_mut0 (opt1)
aggagagucccgcagucggcguccagcggcucugcuuguucgugugugugucguugcaggccuuauucaagcuuaccauggagcugcucauccugaaggccaacgccaucaccaccauccugacggcggugaccuucugcuucgccagcggccagaacaucaccgaggaguucuaccaguccacgugcagcgccgucuccaagggguaccucagcgcccugcggaccggcugguacaccuccgugaucaccaucgagcugagcaacaucaaggagaacaagugcaacgggaccgacgccaaggugaagcucaucaagcaggagcuggacaaguacaagaacgcggucacggagcugcagcuccugaugcaguccaccccggcaaccggcuccggcuccgccaucgcgagcggcgucgccgugugcaaggugcugcaccucgagggggaggucaacaagaucaagagcgcccugcuguccaccaacaaggccguggugagccucuccaacggcgucagcgugcugaccuucaaggugcuggaccucaagaacuacaucgacaagcagcugcugcccauccugaacaagcagagcugcuccaucagcaacaucgagacggugaucgaguuccagcagaagaacaaccggcuccuggagaucacccgcgaguucagcgugaacgccggggucaccacccccguguccacguacaugcugaccaacagcgagcuccugucccugaucaacgacaugccgaucaccaacgaccagaagaagcucaugagcaacaacgugcagaucguccggcagcaguccuacagcaucaugugcaucaucaaggaggaggugcuggcguacgugguccagcugccccucuacggcgugaucgacacccccugcuggaagcugcacacgagcccccugugcaccaccaacaccaaggagggguccaacaucugccucacgcgcaccgaccggggcugguacugcgacaacgccggcagcgucuccuucuucccgcaggccgagaccugcaaggugcagagcaaccgcguguucugcgacaccaugaacucccggacgcugcccagcgagguaaaccucugcaacgucgacaucuucaaccccaaguacgacugcaagaucaugaccuccaagaccgacgugagcuccagcgugaucaccucccugggggccaucgucagcugcuacggcaagacgaagugcaccgccagcaacaagaaccgggggaucaucaagaccuucuccaacggcugcgacuacgugagcaacaagggcguggacaccguguccgucgggaacacccuguacuacgugaacaagcaggagggcaagagccucuacgugaagggggagcccaucaucaacuucuacgacccgcuggucuuccccuccgacgaguucgacgcgagcaucucccaggugaacgagaagaucaaccagagccuggccuucauccgcaaguccgacgagcugcuccacaacgugaacgccggcaagagcacgaccaacaucaugaucaccaccaucaucaucgucaucaucgugauccugcugucccucaucgccguggggcugcugcucuacugcaaggcccggugaggacuagucccuguucccagagcccacuuuuuuuucuuuuuuugaaauaaaauagccugucuuucagaucucaaaggcucuuuucagagccaccaaaaaaaaaaaaaaaaaaaaaaaaaaaaaaaaaaaaaaaaaaaaaaaaaaaaaaaaaaaaaaaaaaaaaaaaaaaaaaaaaaaaaaaaaaaaaaaaaaaaa

SEQ ID NO: 21431 - RNA, 1817 nt, Artificial Sequence
  mRNA product Design a-1 (hSL-A100) comprising derived and/or modified sequence from HRSV(A2)__F-del_DSCav1_mut0 (opt1)
aggagagucccgcagucggcguccagcggcucugcuuguucgugugugugucguugcaggccuuauucaagcuuaccauggagcugcucauccugaaggccaacgccaucaccaccauccugacggcggugaccuucugcuucgccagcggccagaacaucaccgaggaguucuaccaguccacgugcagcgccgucuccaagggguaccucagcgcccugcgcaccggcugguacaccuccgugaucaccaucgagcugagcaacaucaaggagaacaagugcaacgggaccgacgccaaggugaagcucaucaagcaggagcuggacaaguacaagaacgcggucacggagcugcagcuccugaugcaguccacccccgccaccggcagcggguccgccaucgccagcggcguggcggugugcaagguccugcaccucgagggcgaggugaacaagaucaaguccgcccugcugagcaccaacaaggccguggucucccucagcaacgggguguccgugcugacguucaagguccuggaccucaagaacuacaucgacaagcagcugcugccgauccucaacaagcagagcugcuccaucagcaacaucgagaccgugaucgaguuccagcagaagaacaaccggcugcuggagaucacccgcgaguucuccgugaacgccggcgucaccacgcccgugagcaccuacaugcucaccaacagcgagcugcugucccucaucaacgacaugcccaucaccaacgaccagaagaagcugaugagcaacaacgugcagaucguccggcagcaguccuacagcaucaugugcaucaucaaggaggaggugcuggccuacgugguccagcucccccuguacggggugaucgacacgccgugcuggaagcugcacaccagcccccucugcaccaccaacacgaaggagggcuccaacaucugccugacccgcaccgaccgggggugguacugcgacaacgcgggcuccgugagcuucuucccccaggccgagaccugcaagguccaguccaaccgcguguucugcgacacgaugaacagccggacccuccccuccgaggucaaccugugcaacguggacaucuucaacccgaaguacgacugcaagaucaugaccagcaagaccgacguguccagcuccgucaucacgagccugggcgccaucguguccugcuacgggaagaccaagugcaccgccagcaacaagaaccggggcaucaucaagaccuucuccaacgggugcgacuacgugagcaacaagggcgucgacacggugagcgugggcaacacccucuacuacgucaacaagcaggaggggaagucccuguacgugaagggcgagcccaucaucaacuucuacgacccccugguguuccccagcgacgaguucgacgccuccaucagccaggucaacgagaagaucaaccagucccucgcguucauccgcaagagcgacgagcugcugcacaacgugaacgccgggaaguccaccaccaacaucaugaucaccacgaucaucaucgugaucaucgucauccuccugagccugaucgccgugggccuccugcuguacugcaaggcccggugaggacuagucccuguucccagagcccacuuuuuuuucuuuuuuugaaauaaaauagccugucuuucagaucucaaaggcucuuuucagagccaccaaaaaaaaaaaaaaaaaaaaaaaaaaaaaaaaaaaaaaaaaaaaaaaaaaaaaaaaaaaaaaaaaaaaaaaaaaaaaaaaaaaaaaaaaaaaaaaaaaaaa

SEQ ID NO: 21432 - RNA, 1817 nt, Artificial Sequence
  mRNA product Design a-1 (hSL-A100) comprising derived and/or modified sequence from HRSV(A2)__F-del_DSCav1_mut0 (opt1)
aggagagucccgcagucggcguccagcggcucugcuuguucgugugugugucguugcaggccuuauucaagcuuaccauggagcugcucauccugaaggccaacgccaucaccaccauccugacggcggugaccuucugcuucgccagcggccagaacaucaccgaggaguucuaccaguccacgugcagcgccgucuccaagggguaccucagcgcccugcgcaccggcugguacaccuccgugaucaccaucgagcugagcaacaucaaggagaacaagugcaacgggaccgacgccaaggugaagcucaucaagcaggagcuggacaaguacaagaacgcggucacggagcugcagcuccugaugcaguccacccccgccaccggcagcggguccgccaucgccagcggcguggcggugugcaagguccugcaccucgagggcgaggugaacaagaucaaguccgcccugcugagcaccaacaaggccguggucucccucagcaacgggguguccgugcugacguucaagguccuggaccucaagaacuacaucgacaagcagcugcugccgauccucaacaagcagagcugcuccaucagcaacaucgagaccgugaucgaguuccagcagaagaacaaccggcugcuggagaucacccgcgaguucuccgugaacgccggcgucaccacgcccgugagcaccuacaugcucaccaacagcgagcugcugucccucaucaacgacaugcccaucaccaacgaccagaagaagcugaugagcaacaacgugcagaucguccggcagcaguccuacagcaucaugugcaucaucaaggaggaggugcuggccuacgugguccagcucccccuguacggggugaucgacacgccgugcuggaagcugcacaccagcccccucugcaccaccaacacgaaggagggcagcaacaucugccugacccgcaccgaccgggggugguacugcgacaacgcgggcuccgugagcuucuucccccaggccgagaccugcaagguccaguccaaccgcguguucugcgacacgaugaacagccggacccugcccuccgaggucaaccucugcaacguggacaucuucaacccgaaguacgacugcaagaucaugaccagcaagaccgacguguccagcuccgucaucacgagccugggcgccaucguguccugcuacgggaagaccaagugcaccgccagcaacaagaaccgcggcaucaucaagaccuucuccaacgggugcgacuacgugagcaacaagggcgucgacacggugagcgugggcaacacccuguacuacgucaacaagcaggaggggaagucccucuacgugaagggcgagcccaucaucaacuucuacgacccccugguguuccccagcgacgaguucgacgccuccaucagccaggucaacgagaagaucaaccagucccuggcguucauccggaaguccgacgagcuccugcacaacgugaacgccgggaaguccaccaccaacaucaugaucaccacgaucaucaucgugaucaucgucauccugcucagccugaucgccgugggccugcugcucuacugcaaggcccgcugaggacuagucccuguucccagagcccacuuuuuuuucuuuuuuugaaauaaaauagccugucuuucagaucucaaaggcucuuuucagagccaccaaaaaaaaaaaaaaaaaaaaaaaaaaaaaaaaaaaaaaaaaaaaaaaaaaaaaaaaaaaaaaaaaaaaaaaaaaaaaaaaaaaaaaaaaaaaaaaaaaaaa

SEQ ID NO: 21433 - RNA, 1880 nt, Artificial Sequence
  mRNA product Design a-1 (hSL-A100) comprising derived and/or modified sequence from HRSV(A2)__F_DSCav1_mut1 (opt1)
aggagagucccgcagucggcguccagcggcucugcuuguucgugugugugucguugcaggccuuauucaagcuuaccauggagcugcucauccugaaggccaacgccaucaccaccauccugacggcggugaccuucugcuucgccagcggccagaacaucaccgaggaguucuaccaguccacgugcagcgccgucuccaagggguaccucggcgcccugcggaccggcugguacaccuccgugaucaccaucgagcugagcaacaucaaggagaacaagugcaacgggaccgacgccaaggugaagcucaucaagcaggagcuggacaaguacaagaacgcggucacggagcugcagcuccugaugcaguccaccccggcaaccggcuccggcuccgccaucugcagcggcgucgccgugugcaaggugcugcaccucgagggggaggucaacaagaucaagagcgcccugcuguccaccaacaaggccguggugagccucuccaacggcgucagcgugcugaccuucaaggugcuggaccucaagaacuacaucgacaagcagcugcugcccauccugaacaagcagagcugcuccauccccaacaucgagacggugaucgaguuccagcagaagaacaaccggcuccuggagaucacccgcgaguucagcgugaacgccggggucaccacccccguguccacguacaugcugaccaacagcgagcuccugucccugaucaacgacaugccgaucaccaacgaccagaagaagcucaugagcaacaacgugcagaucguccggcagcaguccuacagcaucaugugcaucaucaaggaggaggugcuggcguacgugguccagcugccccucuacggcgugaucgacacccccugcuggaagcugcacacgagcccccugugcaccaccaacaccaaggagggguccaacaucugccucacgcgcaccgaccggggcugguacugcgacaacgccggcagcgucuccuucuucccgcaggccgagaccugcaaggugcagagcaaccgcguguucugcgacaccaugaacucccugacgcugcccagcgagguaaaccucugcaacgucgacaucuucaaccccaaguacgacugcaagaucaugaccuccaagaccgacgugagcuccagcgugaucaccucccugggggccaucgucagcugcuacggcaagacgaagugcaccgccagcaacaagaaccgggggaucaucaagaccuucuccaacggcugcgacuacgugagcaacaagggcguggacaccguguccgucgggaacacccuguacugcgugaacaagcaggagggccagagccucuacgugaagggggagcccaucaucaacuucuacgacccgcuggucuuccccuccgacgaguucgacgcgagcaucucccaggugaacgagaagaucaaccagagccuggccuucauccgcaaguccgacgagcugcuccacaacgugaacgccggcaagagcacgaccaacaucaugaucaccaccaucaucaucgucaucaucgugauccugcugucccucaucgccguggggcugcugcucuacugcaaggcccggagcacgcccgucacccuguccaaggaccagcugagcggcaucaacaacaucgcguucuccaacugaggacuagucccuguucccagagcccacuuuuuuuucuuuuuuugaaauaaaauagccugucuuucagaucucaaaggcucuuuucagagccaccaaaaaaaaaaaaaaaaaaaaaaaaaaaaaaaaaaaaaaaaaaaaaaaaaaaaaaaaaaaaaaaaaaaaaaaaaaaaaaaaaaaaaaaaaaaaaaaaaaaaa

SEQ ID NO: 21434 - RNA, 1880 nt, Artificial Sequence
  mRNA product Design a-1 (hSL-A100) comprising derived and/or modified sequence from HRSV(A2)__F_DSCav1_mut1 (opt1)
aggagagucccgcagucggcguccagcggcucugcuuguucgugugugugucguugcaggccuuauucaagcuuaccauggagcugcucauccugaaggccaacgccaucaccaccauccugacggcggugaccuucugcuucgccagcggccagaacaucaccgaggaguucuaccaguccacgugcagcgccgucuccaagggguaccucggcgcccugcgcaccgggugguacaccagcgugaucaccaucgagcuguccaacaucaaggagaacaagugcaacggcaccgacgccaaggugaagcucaucaagcaggagcuggacaaguacaagaacgcggucacggagcugcagcuccugaugcagagcacccccgccaccggguccggcagcgccaucugcuccggcguggccgugugcaagguccugcaccucgagggggaggugaacaagaucaagagcgcgcugcuguccaccaacaaggccguggucagccucuccaacggcgugagcgugcugacguucaagguccuggaccucaagaacuacaucgacaagcagcugcugccgauccucaacaagcaguccugcagcauccccaacaucgagaccgugaucgaguuccagcagaagaacaaccggcugcuggagaucacccgcgaguucuccgugaacgccggggucaccacgcccgugagcaccuacaugcucaccaacuccgagcugcugagccucaucaacgacaugcccaucaccaacgaccagaagaagcugaugagcaacaacgugcagaucguccggcagcaguccuacagcaucaugugcaucaucaaggaggaggugcuggccuacgugguccagcucccgcuguacggcgugaucgacacgcccugcuggaagcugcacaccagcccccucugcaccaccaacacgaaggagggguccaacaucugccugacccgcaccgaccggggcugguacugcgacaacgccggcuccgugagcuucuucccccaggcggagaccugcaagguccaguccaaccgcguguucugcgacacgaugaacagccugacccucccguccgaggucaaccugugcaacguggacaucuucaaccccaaguacgacugcaagaucaugaccagcaagaccgacguguccagcuccgucaucacgagccugggggccaucguguccugcuacggcaagaccaagugcaccgccagcaacaagaaccgggggaucaucaagaccuucuccaacggcugcgacuacgugagcaacaagggcgucgacacgguguccguggggaacacccucuacugcgucaacaagcaggagggccagagccuguacgugaagggggagcccaucaucaacuucuacgacccccugguguucccgagcgacgaguucgacgccuccaucagccaggucaacgagaagaucaaccagucccucgccuucauccgcaagagcgacgagcugcugcacaacgugaacgcgggcaaguccaccaccaacaucaugaucaccacgaucaucaucgugaucaucgucauccuccugagccugaucgccguggggcuccugcuguacugcaaggcccgguccacccccgugacccugagcaaggaccagcucuccggcaucaacaacaucgccuucagcaacugaggacuagucccuguucccagagcccacuuuuuuuucuuuuuuugaaauaaaauagccugucuuucagaucucaaaggcucuuuucagagccaccaaaaaaaaaaaaaaaaaaaaaaaaaaaaaaaaaaaaaaaaaaaaaaaaaaaaaaaaaaaaaaaaaaaaaaaaaaaaaaaaaaaaaaaaaaaaaaaaaaaaa

SEQ ID NO: 21435 - RNA, 1880 nt, Artificial Sequence
  mRNA product Design a-1 (hSL-A100) comprising derived and/or modified sequence from HRSV(A2)__F_DSCav1_mut1 (opt1)
aggagagucccgcagucggcguccagcggcucugcuuguucgugugugugucguugcaggccuuauucaagcuuaccauggagcugcucauccugaaggccaacgccaucaccaccauccugacggcggugaccuucugcuucgccagcggccagaacaucaccgaggaguucuaccaguccacgugcagcgccgucuccaagggguaccucggcgcccugcgcaccgggugguacaccagcgugaucaccaucgagcuguccaacaucaaggagaacaagugcaacggcaccgacgccaaggugaagcucaucaagcaggagcuggacaaguacaagaacgcggucacggagcugcagcuccugaugcagagcacccccgccaccggguccggcagcgccaucugcuccggcguggccgugugcaagguccugcaccucgagggggaggugaacaagaucaagagcgcgcugcuguccaccaacaaggccguggucagccucuccaacggcgugagcgugcugacguucaagguccuggaccucaagaacuacaucgacaagcagcugcugccgauccucaacaagcaguccugcagcauccccaacaucgagaccgugaucgaguuccagcagaagaacaaccggcugcuggagaucacccgcgaguucuccgugaacgccggggucaccacgcccgugagcaccuacaugcucaccaacuccgagcugcugagccucaucaacgacaugcccaucaccaacgaccagaagaagcugaugagcaacaacgugcagaucguccggcagcaguccuacagcaucaugugcaucaucaaggaggaggugcuggccuacgugguccagcucccgcuguacggcgugaucgacacgcccugcuggaagcugcacaccagcccccucugcaccaccaacacgaaggagggguccaacaucugccugacccgcaccgaccggggcugguacugcgacaacgccggcuccgugagcuucuucccccaggcggagaccugcaagguccaguccaaccgcguguucugcgacacgaugaacagccugacccucccguccgaggucaaccugugcaacguggacaucuucaaccccaaguacgacugcaagaucaugaccagcaagaccgacguguccagcuccgucaucacgagccugggggccaucguguccugcuacggcaagaccaagugcaccgccagcaacaagaaccgggggaucaucaagaccuucuccaacggcugcgacuacgugagcaacaagggcgucgacacgguguccguggggaacacccucuacugcgucaacaagcaggagggccagagccuguacgugaagggggagcccaucaucaacuucuacgacccccugguguucccgagcgacgaguucgacgccuccaucagccaggucaacgagaagaucaaccagucccucgccuucauccgcaagagcgacgagcugcugcacaacgugaacgcgggcaaguccaccaccaacaucaugaucaccacgaucaucaucgugaucaucgucauccuccugagccugaucgccguggggcugcuccuguacugcaaggcccgguccacccccgugacccugagcaaggaccagcucuccggcaucaacaacaucgccuucagcaacugaggacuagucccuguucccagagcccacuuuuuuuucuuuuuuugaaauaaaauagccugucuuucagaucucaaaggcucuuuucagagccaccaaaaaaaaaaaaaaaaaaaaaaaaaaaaaaaaaaaaaaaaaaaaaaaaaaaaaaaaaaaaaaaaaaaaaaaaaaaaaaaaaaaaaaaaaaaaaaaaaaaaa

SEQ ID NO: 21436 - RNA, 1817 nt, Artificial Sequence
  mRNA product Design a-1 (hSL-A100) comprising derived and/or modified sequence from HRSV(A2)__F-del_DSCav1_mut1 (opt1)
aggagagucccgcagucggcguccagcggcucugcuuguucgugugugugucguugcaggccuuauucaagcuuaccauggagcugcucauccugaaggccaacgccaucaccaccauccugacggcggugaccuucugcuucgccagcggccagaacaucaccgaggaguucuaccaguccacgugcagcgccgucuccaagggguaccucggcgcccugcggaccggcugguacaccuccgugaucaccaucgagcugagcaacaucaaggagaacaagugcaacgggaccgacgccaaggugaagcucaucaagcaggagcuggacaaguacaagaacgcggucacggagcugcagcuccugaugcaguccaccccggcaaccggcuccggcuccgccaucugcagcggcgucgccgugugcaaggugcugcaccucgagggggaggucaacaagaucaagagcgcccugcuguccaccaacaaggccguggugagccucuccaacggcgucagcgugcugaccuucaaggugcuggaccucaagaacuacaucgacaagcagcugcugcccauccugaacaagcagagcugcuccauccccaacaucgagacggugaucgaguuccagcagaagaacaaccggcuccuggagaucacccgcgaguucagcgugaacgccggggucaccacccccguguccacguacaugcugaccaacagcgagcuccugucccugaucaacgacaugccgaucaccaacgaccagaagaagcucaugagcaacaacgugcagaucguccggcagcaguccuacagcaucaugugcaucaucaaggaggaggugcuggcguacgugguccagcugccccucuacggcgugaucgacacccccugcuggaagcugcacacgagcccccugugcaccaccaacaccaaggagggguccaacaucugccucacgcgcaccgaccggggcugguacugcgacaacgccggcagcgucuccuucuucccgcaggccgagaccugcaaggugcagagcaaccgcguguucugcgacaccaugaacucccugacgcugcccagcgagguaaaccucugcaacgucgacaucuucaaccccaaguacgacugcaagaucaugaccuccaagaccgacgugagcuccagcgugaucaccucccugggggccaucgucagcugcuacggcaagacgaagugcaccgccagcaacaagaaccgggggaucaucaagaccuucuccaacggcugcgacuacgugagcaacaagggcguggacaccguguccgucgggaacacccuguacugcgugaacaagcaggagggccagagccucuacgugaagggggagcccaucaucaacuucuacgacccgcuggucuuccccuccgacgaguucgacgcgagcaucucccaggugaacgagaagaucaaccagagccuggccuucauccgcaaguccgacgagcugcuccacaacgugaacgccggcaagagcacgaccaacaucaugaucaccaccaucaucaucgucaucaucgugauccugcugucccucaucgccguggggcugcugcucuacugcaaggcccggugaggacuagucccuguucccagagcccacuuuuuuuucuuuuuuugaaauaaaauagccugucuuucagaucucaaaggcucuuuucagagccaccaaaaaaaaaaaaaaaaaaaaaaaaaaaaaaaaaaaaaaaaaaaaaaaaaaaaaaaaaaaaaaaaaaaaaaaaaaaaaaaaaaaaaaaaaaaaaaaaaaaaa

SEQ ID NO: 21437 - RNA, 1817 nt, Artificial Sequence
  mRNA product Design a-1 (hSL-A100) comprising derived and/or modified sequence from HRSV(A2)__F-del_DSCav1_mut1 (opt1)
aggagagucccgcagucggcguccagcggcucugcuuguucgugugugugucguugcaggccuuauucaagcuuaccauggagcugcucauccugaaggccaacgccaucaccaccauccugacggcggugaccuucugcuucgccagcggccagaacaucaccgaggaguucuaccaguccacgugcagcgccgucuccaagggguaccucggcgcccugcgcaccgggugguacaccagcgugaucaccaucgagcuguccaacaucaaggagaacaagugcaacggcaccgacgccaaggugaagcucaucaagcaggagcuggacaaguacaagaacgcggucacggagcugcagcuccugaugcagagcacccccgccaccggguccggcagcgccaucugcuccggcguggccgugugcaagguccugcaccucgagggggaggugaacaagaucaagagcgcgcugcuguccaccaacaaggccguggucagccucuccaacggcgugagcgugcugacguucaagguccuggaccucaagaacuacaucgacaagcagcugcugccgauccucaacaagcaguccugcagcauccccaacaucgagaccgugaucgaguuccagcagaagaacaaccggcugcuggagaucacccgcgaguucuccgugaacgccggggucaccacgcccgugagcaccuacaugcucaccaacuccgagcugcugagccucaucaacgacaugcccaucaccaacgaccagaagaagcugaugagcaacaacgugcagaucguccggcagcaguccuacagcaucaugugcaucaucaaggaggaggugcuggccuacgugguccagcucccgcuguacggcgugaucgacacgcccugcuggaagcugcacaccagcccccucugcaccaccaacacgaaggagggguccaacaucugccugacccgcaccgaccggggcugguacugcgacaacgccggcuccgugagcuucuucccccaggcggagaccugcaagguccaguccaaccgcguguucugcgacacgaugaacagccugacccucccguccgaggucaaccugugcaacguggacaucuucaaccccaaguacgacugcaagaucaugaccagcaagaccgacguguccagcuccgucaucacgagccugggggccaucguguccugcuacggcaagaccaagugcaccgccagcaacaagaaccgggggaucaucaagaccuucuccaacggcugcgacuacgugagcaacaagggcgucgacacgguguccguggggaacacccucuacugcgucaacaagcaggagggccagagccuguacgugaagggggagcccaucaucaacuucuacgacccccugguguucccgagcgacgaguucgacgccuccaucagccaggucaacgagaagaucaaccagucccucgccuucauccgcaagagcgacgagcugcugcacaacgugaacgcgggcaaguccaccaccaacaucaugaucaccacgaucaucaucgugaucaucgucauccuccugagccugaucgccguggggcuccugcuguacugcaaggcccggugaggacuagucccuguucccagagcccacuuuuuuuucuuuuuuugaaauaaaauagccugucuuucagaucucaaaggcucuuuucagagccaccaaaaaaaaaaaaaaaaaaaaaaaaaaaaaaaaaaaaaaaaaaaaaaaaaaaaaaaaaaaaaaaaaaaaaaaaaaaaaaaaaaaaaaaaaaaaaaaaaaaaa

SEQ ID NO: 21438 - RNA, 1817 nt, Artificial Sequence
  mRNA product Design a-1 (hSL-A100) comprising derived and/or modified sequence from HRSV(A2)__F-del_DSCav1_mut1 (opt1)
aggagagucccgcagucggcguccagcggcucugcuuguucgugugugugucguugcaggccuuauucaagcuuaccauggagcugcucauccugaaggccaacgccaucaccaccauccugacggcggugaccuucugcuucgccagcggccagaacaucaccgaggaguucuaccaguccacgugcagcgccgucuccaagggguaccucggcgcccugcgcaccgggugguacaccagcgugaucaccaucgagcuguccaacaucaaggagaacaagugcaacggcaccgacgccaaggugaagcucaucaagcaggagcuggacaaguacaagaacgcggucacggagcugcagcuccugaugcagagcacccccgccaccggguccggcagcgccaucugcuccggcguggccgugugcaagguccugcaccucgagggggaggugaacaagaucaagagcgcgcugcuguccaccaacaaggccguggucagccucuccaacggcgugagcgugcugacguucaagguccuggaccucaagaacuacaucgacaagcagcugcugccgauccucaacaagcaguccugcagcauccccaacaucgagaccgugaucgaguuccagcagaagaacaaccggcugcuggagaucacccgcgaguucuccgugaacgccggggucaccacgcccgugagcaccuacaugcucaccaacuccgagcugcugagccucaucaacgacaugcccaucaccaacgaccagaagaagcugaugagcaacaacgugcagaucguccggcagcaguccuacagcaucaugugcaucaucaaggaggaggugcuggccuacgugguccagcucccgcuguacggcgugaucgacacgcccugcuggaagcugcacaccagcccccucugcaccaccaacacgaaggagggguccaacaucugccugacccgcaccgaccggggcugguacugcgacaacgccggcuccgugagcuucuucccccaggcggagaccugcaagguccaguccaaccgcguguucugcgacacgaugaacagccugacccucccguccgaggucaaccugugcaacguggacaucuucaaccccaaguacgacugcaagaucaugaccagcaagaccgacguguccagcuccgucaucacgagccugggggccaucguguccugcuacggcaagaccaagugcaccgccagcaacaagaaccgggggaucaucaagaccuucuccaacggcugcgacuacgugagcaacaagggcgucgacacgguguccguggggaacacccucuacugcgucaacaagcaggagggccagagccuguacgugaagggggagcccaucaucaacuucuacgacccccugguguucccgagcgacgaguucgacgccuccaucagccaggucaacgagaagaucaaccagucccucgccuucauccgcaagagcgacgagcugcugcacaacgugaacgcgggcaaguccaccaccaacaucaugaucaccacgaucaucaucgugaucaucgucauccuccugagccugaucgccguggggcugcuccuguacugcaaggcccggugaggacuagucccuguucccagagcccacuuuuuuuucuuuuuuugaaauaaaauagccugucuuucagaucucaaaggcucuuuucagagccaccaaaaaaaaaaaaaaaaaaaaaaaaaaaaaaaaaaaaaaaaaaaaaaaaaaaaaaaaaaaaaaaaaaaaaaaaaaaaaaaaaaaaaaaaaaaaaaaaaaaaa

SEQ ID NO: 21439 - RNA, 1880 nt, Artificial Sequence
  mRNA product Design a-1 (hSL-A100) comprising derived and/or modified sequence from HRSV(A2)__F_DSCav1_mut2 (opt1)
aggagagucccgcagucggcguccagcggcucugcuuguucgugugugugucguugcaggccuuauucaagcuuaccauggagcugcucauccugaaggccaacgccaucaccaccauccugacggcggugaccuucugcuucgccagcggccagaacaucaccgaggaguucuaccaguccacgugcagcgccgucuccaagggguaccucggcgcccugcggaccggcugguacaccuccgugaucaccaucgagcugagcaacaucaaggagaacaagugcaacgggaccgacgccaaggugaagcucaucaagcaggagcuggacaaguacaagaacgcggucacggaccugcagcuccugaugcaguccaccccggcaaccggcuccggcuccgccaucugcagcggcgucgccgugugcaaggugcugcaccucgagggggaggucaacaagaucaagagcgcccugcuguccaccaacaaggccguggugagccucuccaacggcgucagcgugcugaccuucaaggugcuggaccucaagaacuacaucgacaagcagcugcugcccauccugaacaagcagagcugcuccauccccaacaucgagacggugaucgaguuccagcagaagaacaaccggcuccuggagaucacccgcgaguucagcgugaacgccggggucaccacccccguguccacguacaugcugaccaacagcgagcuccugucccugaucaacgacaugccgaucaccaacgaccagaagaagcucaugagcaacaacgugcagaucguccggcagcaguccuacagcaucaugugcaucaucaaggaggaggugcuggcguacgugguccagcugccccucuacggcgugaucgacacccccugcuggaagcugcacacgagcccccugugcaccaccaacaccaaggagggguccaacaucugccucacgcgcaccgaccggggcugguacugcgacaacgccggcagcgucuccuucuucccgcaggccgagaccugcaaggugcagagcaaccgcguguucugcgacaccaugaacucccugacgcugcccagcgagguaaaccucugcaacgucgacaucuucaaccccaaguacgacugcaagaucaugaccuccaagaccgacgugagcuccagcgugaucaccucccugggggccaucgucagcugcuacggcaagacgaagugcaccgccagcaacaagaaccgggggaucaucaagaccuucuccaacggcugcgacuacgugagcaacaagggcguggacaccguguccgucgggaacacccuguacugcgugaacaagcaggagggccagagccucuacgugaagggggagcccaucaucaacuucuacgacccgcuggucuuccccuccgacgaguucgacgcgagcaucucccaggugaacgagaagaucaaccagagccuggccuucauccgcaaguccgacgagcugcuccacaacgugaacgccggcaagagcacgaccaacaucaugaucaccaccaucaucaucgucaucaucgugauccugcugucccucaucgccguggggcugcugcucuacugcaaggcccggagcacgcccgucacccuguccaaggaccagcugagcggcaucaacaacaucgcguucuccaacugaggacuagucccuguucccagagcccacuuuuuuuucuuuuuuugaaauaaaauagccugucuuucagaucucaaaggcucuuuucagagccaccaaaaaaaaaaaaaaaaaaaaaaaaaaaaaaaaaaaaaaaaaaaaaaaaaaaaaaaaaaaaaaaaaaaaaaaaaaaaaaaaaaaaaaaaaaaaaaaaaaaaa

SEQ ID NO: 21440 - RNA, 1880 nt, Artificial Sequence
  mRNA product Design a-1 (hSL-A100) comprising derived and/or modified sequence from HRSV(A2)__F_DSCav1_mut2 (opt1)
aggagagucccgcagucggcguccagcggcucugcuuguucgugugugugucguugcaggccuuauucaagcuuaccauggagcugcucauccugaaggccaacgccaucaccaccauccugacggcggugaccuucugcuucgccagcggccagaacaucaccgaggaguucuaccaguccacgugcagcgccgucuccaagggguaccucggcgcccugcgcaccgggugguacaccagcgugaucaccaucgagcuguccaacaucaaggagaacaagugcaacggcaccgacgccaaggugaagcucaucaagcaggagcuggacaaguacaagaacgcggucacggaccugcagcuccugaugcagagcacccccgccaccggguccggcagcgccaucugcuccggcguggccgugugcaagguccugcaccucgagggggaggugaacaagaucaagagcgcgcugcuguccaccaacaaggccguggucagccucuccaacggcgugagcgugcugacguucaagguccuggaccucaagaacuacaucgacaagcagcugcugccgauccucaacaagcaguccugcagcauccccaacaucgagaccgugaucgaguuccagcagaagaacaaccggcugcuggagaucacccgcgaguucuccgugaacgccggggucaccacgcccgugagcaccuacaugcucaccaacuccgagcugcugagccucaucaacgacaugcccaucaccaacgaccagaagaagcugaugagcaacaacgugcagaucguccggcagcaguccuacagcaucaugugcaucaucaaggaggaggugcuggccuacgugguccagcucccgcuguacggcgugaucgacacgcccugcuggaagcugcacaccagcccccucugcaccaccaacacgaaggagggguccaacaucugccugacccgcaccgaccggggcugguacugcgacaacgccggcuccgugagcuucuucccccaggcggagaccugcaagguccaguccaaccgcguguucugcgacacgaugaacagccugacccucccguccgaggucaaccugugcaacguggacaucuucaaccccaaguacgacugcaagaucaugaccagcaagaccgacguguccagcuccgucaucacgagccugggggccaucguguccugcuacggcaagaccaagugcaccgccagcaacaagaaccgggggaucaucaagaccuucuccaacggcugcgacuacgugagcaacaagggcgucgacacgguguccguggggaacacccucuacugcgucaacaagcaggagggccagagccuguacgugaagggggagcccaucaucaacuucuacgacccccugguguucccgagcgacgaguucgacgccuccaucagccaggucaacgagaagaucaaccagucccucgccuucauccgcaagagcgacgagcugcugcacaacgugaacgcgggcaaguccaccaccaacaucaugaucaccacgaucaucaucgugaucaucgucauccuccugagccugaucgccguggggcuccugcuguacugcaaggcccgguccacccccgugacccugagcaaggaccagcucuccggcaucaacaacaucgccuucagcaacugaggacuagucccuguucccagagcccacuuuuuuuucuuuuuuugaaauaaaauagccugucuuucagaucucaaaggcucuuuucagagccaccaaaaaaaaaaaaaaaaaaaaaaaaaaaaaaaaaaaaaaaaaaaaaaaaaaaaaaaaaaaaaaaaaaaaaaaaaaaaaaaaaaaaaaaaaaaaaaaaaaaaa

SEQ ID NO: 21441 - RNA, 1880 nt, Artificial Sequence
  mRNA product Design a-1 (hSL-A100) comprising derived and/or modified sequence from HRSV(A2)__F_DSCav1_mut2 (opt1)
aggagagucccgcagucggcguccagcggcucugcuuguucgugugugugucguugcaggccuuauucaagcuuaccauggagcugcucauccugaaggccaacgccaucaccaccauccugacggcggugaccuucugcuucgccagcggccagaacaucaccgaggaguucuaccaguccacgugcagcgccgucuccaagggguaccucggcgcccugcgcaccgggugguacaccagcgugaucaccaucgagcuguccaacaucaaggagaacaagugcaacggcaccgacgccaaggugaagcucaucaagcaggagcuggacaaguacaagaacgcggucacggaccugcagcuccugaugcagagcacccccgccaccggguccggcagcgccaucugcuccggcguggccgugugcaagguccugcaccucgagggggaggugaacaagaucaagagcgcgcugcuguccaccaacaaggccguggucagccucuccaacggcgugagcgugcugacguucaagguccuggaccucaagaacuacaucgacaagcagcugcugccgauccucaacaagcaguccugcagcauccccaacaucgagaccgugaucgaguuccagcagaagaacaaccggcugcuggagaucacccgcgaguucuccgugaacgccggggucaccacgcccgugagcaccuacaugcucaccaacuccgagcugcugagccucaucaacgacaugcccaucaccaacgaccagaagaagcugaugagcaacaacgugcagaucguccggcagcaguccuacagcaucaugugcaucaucaaggaggaggugcuggccuacgugguccagcucccgcuguacggcgugaucgacacgcccugcuggaagcugcacaccagcccccucugcaccaccaacacgaaggagggguccaacaucugccugacccgcaccgaccggggcugguacugcgacaacgccggcuccgugagcuucuucccccaggcggagaccugcaagguccaguccaaccgcguguucugcgacacgaugaacagccugacccucccguccgaggucaaccugugcaacguggacaucuucaaccccaaguacgacugcaagaucaugaccagcaagaccgacguguccagcuccgucaucacgagccugggggccaucguguccugcuacggcaagaccaagugcaccgccagcaacaagaaccgggggaucaucaagaccuucuccaacggcugcgacuacgugagcaacaagggcgucgacacgguguccguggggaacacccucuacugcgucaacaagcaggagggccagagccuguacgugaagggggagcccaucaucaacuucuacgacccccugguguucccgagcgacgaguucgacgccuccaucagccaggucaacgagaagaucaaccagucccucgccuucauccgcaagagcgacgagcugcugcacaacgugaacgcgggcaaguccaccaccaacaucaugaucaccacgaucaucaucgugaucaucgucauccuccugagccugaucgccguggggcugcuccuguacugcaaggcccgguccacccccgugacccugagcaaggaccagcucuccggcaucaacaacaucgccuucagcaacugaggacuagucccuguucccagagcccacuuuuuuuucuuuuuuugaaauaaaauagccugucuuucagaucucaaaggcucuuuucagagccaccaaaaaaaaaaaaaaaaaaaaaaaaaaaaaaaaaaaaaaaaaaaaaaaaaaaaaaaaaaaaaaaaaaaaaaaaaaaaaaaaaaaaaaaaaaaaaaaaaaaaa

SEQ ID NO: 21442 - RNA, 1817 nt, Artificial Sequence
  mRNA product Design a-1 (hSL-A100) comprising derived and/or modified sequence from HRSV(A2)__F-del_DSCav1_mut2 (opt1)
aggagagucccgcagucggcguccagcggcucugcuuguucgugugugugucguugcaggccuuauucaagcuuaccauggagcugcucauccugaaggccaacgccaucaccaccauccugacggcggugaccuucugcuucgccagcggccagaacaucaccgaggaguucuaccaguccacgugcagcgccgucuccaagggguaccucggcgcccugcggaccggcugguacaccuccgugaucaccaucgagcugagcaacaucaaggagaacaagugcaacgggaccgacgccaaggugaagcucaucaagcaggagcuggacaaguacaagaacgcggucacggaccugcagcuccugaugcaguccaccccggcaaccggcuccggcuccgccaucugcagcggcgucgccgugugcaaggugcugcaccucgagggggaggucaacaagaucaagagcgcccugcuguccaccaacaaggccguggugagccucuccaacggcgucagcgugcugaccuucaaggugcuggaccucaagaacuacaucgacaagcagcugcugcccauccugaacaagcagagcugcuccauccccaacaucgagacggugaucgaguuccagcagaagaacaaccggcuccuggagaucacccgcgaguucagcgugaacgccggggucaccacccccguguccacguacaugcugaccaacagcgagcuccugucccugaucaacgacaugccgaucaccaacgaccagaagaagcucaugagcaacaacgugcagaucguccggcagcaguccuacagcaucaugugcaucaucaaggaggaggugcuggcguacgugguccagcugccccucuacggcgugaucgacacccccugcuggaagcugcacacgagcccccugugcaccaccaacaccaaggagggguccaacaucugccucacgcgcaccgaccggggcugguacugcgacaacgccggcagcgucuccuucuucccgcaggccgagaccugcaaggugcagagcaaccgcguguucugcgacaccaugaacucccugacgcugcccagcgagguaaaccucugcaacgucgacaucuucaaccccaaguacgacugcaagaucaugaccuccaagaccgacgugagcuccagcgugaucaccucccugggggccaucgucagcugcuacggcaagacgaagugcaccgccagcaacaagaaccgggggaucaucaagaccuucuccaacggcugcgacuacgugagcaacaagggcguggacaccguguccgucgggaacacccuguacugcgugaacaagcaggagggccagagccucuacgugaagggggagcccaucaucaacuucuacgacccgcuggucuuccccuccgacgaguucgacgcgagcaucucccaggugaacgagaagaucaaccagagccuggccuucauccgcaaguccgacgagcugcuccacaacgugaacgccggcaagagcacgaccaacaucaugaucaccaccaucaucaucgucaucaucgugauccugcugucccucaucgccguggggcugcugcucuacugcaaggcccggugaggacuagucccuguucccagagcccacuuuuuuuucuuuuuuugaaauaaaauagccugucuuucagaucucaaaggcucuuuucagagccaccaaaaaaaaaaaaaaaaaaaaaaaaaaaaaaaaaaaaaaaaaaaaaaaaaaaaaaaaaaaaaaaaaaaaaaaaaaaaaaaaaaaaaaaaaaaaaaaaaaaaa

SEQ ID NO: 21443 - RNA, 1817 nt, Artificial Sequence
  mRNA product Design a-1 (hSL-A100) comprising derived and/or modified sequence from HRSV(A2)__F-del_DSCav1_mut2 (opt1)
aggagagucccgcagucggcguccagcggcucugcuuguucgugugugugucguugcaggccuuauucaagcuuaccauggagcugcucauccugaaggccaacgccaucaccaccauccugacggcggugaccuucugcuucgccagcggccagaacaucaccgaggaguucuaccaguccacgugcagcgccgucuccaagggguaccucggcgcccugcgcaccgggugguacaccagcgugaucaccaucgagcuguccaacaucaaggagaacaagugcaacggcaccgacgccaaggugaagcucaucaagcaggagcuggacaaguacaagaacgcggucacggaccugcagcuccugaugcagagcacccccgccaccggguccggcagcgccaucugcuccggcguggccgugugcaagguccugcaccucgagggggaggugaacaagaucaagagcgcgcugcuguccaccaacaaggccguggucagccucuccaacggcgugagcgugcugacguucaagguccuggaccucaagaacuacaucgacaagcagcugcugccgauccucaacaagcaguccugcagcauccccaacaucgagaccgugaucgaguuccagcagaagaacaaccggcugcuggagaucacccgcgaguucuccgugaacgccggggucaccacgcccgugagcaccuacaugcucaccaacuccgagcugcugagccucaucaacgacaugcccaucaccaacgaccagaagaagcugaugagcaacaacgugcagaucguccggcagcaguccuacagcaucaugugcaucaucaaggaggaggugcuggccuacgugguccagcucccgcuguacggcgugaucgacacgcccugcuggaagcugcacaccagcccccucugcaccaccaacacgaaggagggguccaacaucugccugacccgcaccgaccggggcugguacugcgacaacgccggcuccgugagcuucuucccccaggcggagaccugcaagguccaguccaaccgcguguucugcgacacgaugaacagccugacccucccguccgaggucaaccugugcaacguggacaucuucaaccccaaguacgacugcaagaucaugaccagcaagaccgacguguccagcuccgucaucacgagccugggggccaucguguccugcuacggcaagaccaagugcaccgccagcaacaagaaccgggggaucaucaagaccuucuccaacggcugcgacuacgugagcaacaagggcgucgacacgguguccguggggaacacccucuacugcgucaacaagcaggagggccagagccuguacgugaagggggagcccaucaucaacuucuacgacccccugguguucccgagcgacgaguucgacgccuccaucagccaggucaacgagaagaucaaccagucccucgccuucauccgcaagagcgacgagcugcugcacaacgugaacgcgggcaaguccaccaccaacaucaugaucaccacgaucaucaucgugaucaucgucauccuccugagccugaucgccguggggcuccugcuguacugcaaggcccggugaggacuagucccuguucccagagcccacuuuuuuuucuuuuuuugaaauaaaauagccugucuuucagaucucaaaggcucuuuucagagccaccaaaaaaaaaaaaaaaaaaaaaaaaaaaaaaaaaaaaaaaaaaaaaaaaaaaaaaaaaaaaaaaaaaaaaaaaaaaaaaaaaaaaaaaaaaaaaaaaaaaaa

SEQ ID NO: 21444 - RNA, 1817 nt, Artificial Sequence
  mRNA product Design a-1 (hSL-A100) comprising derived and/or modified sequence from HRSV(A2)__F-del_DSCav1_mut2 (opt1)
aggagagucccgcagucggcguccagcggcucugcuuguucgugugugugucguugcaggccuuauucaagcuuaccauggagcugcucauccugaaggccaacgccaucaccaccauccugacggcggugaccuucugcuucgccagcggccagaacaucaccgaggaguucuaccaguccacgugcagcgccgucuccaagggguaccucggcgcccugcgcaccgggugguacaccagcgugaucaccaucgagcuguccaacaucaaggagaacaagugcaacggcaccgacgccaaggugaagcucaucaagcaggagcuggacaaguacaagaacgcggucacggaccugcagcuccugaugcagagcacccccgccaccggguccggcagcgccaucugcuccggcguggccgugugcaagguccugcaccucgagggggaggugaacaagaucaagagcgcgcugcuguccaccaacaaggccguggucagccucuccaacggcgugagcgugcugacguucaagguccuggaccucaagaacuacaucgacaagcagcugcugccgauccucaacaagcaguccugcagcauccccaacaucgagaccgugaucgaguuccagcagaagaacaaccggcugcuggagaucacccgcgaguucuccgugaacgccggggucaccacgcccgugagcaccuacaugcucaccaacuccgagcugcugagccucaucaacgacaugcccaucaccaacgaccagaagaagcugaugagcaacaacgugcagaucguccggcagcaguccuacagcaucaugugcaucaucaaggaggaggugcuggccuacgugguccagcucccgcuguacggcgugaucgacacgcccugcuggaagcugcacaccagcccccucugcaccaccaacacgaaggagggguccaacaucugccugacccgcaccgaccggggcugguacugcgacaacgccggcuccgugagcuucuucccccaggcggagaccugcaagguccaguccaaccgcguguucugcgacacgaugaacagccugacccucccguccgaggucaaccugugcaacguggacaucuucaaccccaaguacgacugcaagaucaugaccagcaagaccgacguguccagcuccgucaucacgagccugggggccaucguguccugcuacggcaagaccaagugcaccgccagcaacaagaaccgggggaucaucaagaccuucuccaacggcugcgacuacgugagcaacaagggcgucgacacgguguccguggggaacacccucuacugcgucaacaagcaggagggccagagccuguacgugaagggggagcccaucaucaacuucuacgacccccugguguucccgagcgacgaguucgacgccuccaucagccaggucaacgagaagaucaaccagucccucgccuucauccgcaagagcgacgagcugcugcacaacgugaacgcgggcaaguccaccaccaacaucaugaucaccacgaucaucaucgugaucaucgucauccuccugagccugaucgccguggggcugcuccuguacugcaaggcccggugaggacuagucccuguucccagagcccacuuuuuuuucuuuuuuugaaauaaaauagccugucuuucagaucucaaaggcucuuuucagagccaccaaaaaaaaaaaaaaaaaaaaaaaaaaaaaaaaaaaaaaaaaaaaaaaaaaaaaaaaaaaaaaaaaaaaaaaaaaaaaaaaaaaaaaaaaaaaaaaaaaaaa

SEQ ID NO: 21445 - RNA, 1880 nt, Artificial Sequence
  mRNA product Design a-1 (hSL-A100) comprising derived and/or modified sequence from HRSV(A2)__F_DSCav1_mut3 (opt1)
aggagagucccgcagucggcguccagcggcucugcuuguucgugugugugucguugcaggccuuauucaagcuuaccauggagcugcucauccugaaggccaacgccaucaccaccauccugacggcggugaccuucugcuucgccagcggccagaacaucaccgaggaguucuaccaguccacgugcagcgccgucuccaagggguaccucggcgcccugcggaccggcugguacaccuccgugaucaccaucgagcugagcaacaucaaggagaucaagugcaacgggaccgacgccaaggugaagcucaucaagcaggagcuggacaaguacaagaacgcggucacggaccugcagcuccugaugcaguccaccccggcaaccggcuccggcuccgccaucugcagcggcgucgccgugugcaaggugcugcaccucgagggggaggucaacaagaucaagagcgcccugcuguccaccaacaaggccguggugagccucuccaacggcgucagcgugcugaccuucaaggugcuggaccucaagaacuacaucgacaagcagcugcugcccauccugaacaagcagagcugcuccauccccaacaucgagacggugaucgaguuccagcagaagaacaaccggcuccuggagaucacccgcgaguucagcgugaacgccggggucaccacccccguguccacguacaugcugaccaacagcgagcuccugucccugaucaacgacaugccgaucaccaacgaccagaagaagcucaugagcaacaacgugcagaucguccggcagcaguccuacagcaucaugugcaucaucaaggaggaggugcuggcguacgugguccagcugccccucuacggcgugaucgacacccccugcuggaagcugcacacgagcccccugugcaccaccaacaccaaggagggguccaacaucugccucacgcgcaccgaccggggcugguacugcgacaacgccggcagcgucuccuucuucccgcaggccgagaccugcaaggugcagagcaaccgcguguucugcgacaccaugaacucccugacgcugcccagcgagguaaaccucugcaacgucgacaucuucaaccccaaguacgacugcaagaucaugaccuccaagaccgacgugagcuccagcgugaucaccucccugggggccaucgucagcugcuacggcaagacgaagugcaccgccagcaacaagaaccgggggaucaucaagaccuucuccaacggcugcgacuacgugagcaacaagggcguggacaccguguccgucgggaacacccuguacugcgugaacaagcaggagggccagagccucuacgugaagggggagcccaucaucaacuucuacgacccgcuggucuuccccuccgacgaguucgacgcgagcaucucccaggugaacgagaagaucaaccagagccuggccuucauccgcaaguccgacgagcugcuccacaacgugaacgccggcaagagcacgaccaacaucaugaucaccaccaucaucaucgucaucaucgugauccugcugucccucaucgccguggggcugcugcucuacugcaaggcccggagcacgcccgucacccuguccaaggaccagcugagcggcaucaacaacaucgcguucuccaacugaggacuagucccuguucccagagcccacuuuuuuuucuuuuuuugaaauaaaauagccugucuuucagaucucaaaggcucuuuucagagccaccaaaaaaaaaaaaaaaaaaaaaaaaaaaaaaaaaaaaaaaaaaaaaaaaaaaaaaaaaaaaaaaaaaaaaaaaaaaaaaaaaaaaaaaaaaaaaaaaaaaaa

SEQ ID NO: 21446 - RNA, 1880 nt, Artificial Sequence
  mRNA product Design a-1 (hSL-A100) comprising derived and/or modified sequence from HRSV(A2)__F_DSCav1_mut3 (opt1)
aggagagucccgcagucggcguccagcggcucugcuuguucgugugugugucguugcaggccuuauucaagcuuaccauggagcugcucauccugaaggccaacgccaucaccaccauccugacggcggugaccuucugcuucgccagcggccagaacaucaccgaggaguucuaccaguccacgugcagcgccgucuccaagggguaccucggcgcccugcgcaccgggugguacaccagcgugaucaccaucgagcuguccaacaucaaggagaucaagugcaacggcaccgacgccaaggugaagcucaucaagcaggagcuggacaaguacaagaacgcggucacggaccugcagcuccugaugcagagcacccccgccaccggguccggcagcgccaucugcuccggcguggccgugugcaagguccugcaccucgagggggaggugaacaagaucaagagcgcgcugcuguccaccaacaaggccguggucagccucuccaacggcgugagcgugcugacguucaagguccuggaccucaagaacuacaucgacaagcagcugcugccgauccucaacaagcaguccugcagcauccccaacaucgagaccgugaucgaguuccagcagaagaacaaccggcugcuggagaucacccgcgaguucuccgugaacgccggggucaccacgcccgugagcaccuacaugcucaccaacuccgagcugcugagccucaucaacgacaugcccaucaccaacgaccagaagaagcugaugagcaacaacgugcagaucguccggcagcaguccuacagcaucaugugcaucaucaaggaggaggugcuggccuacgugguccagcucccgcuguacggcgugaucgacacgcccugcuggaagcugcacaccagcccccucugcaccaccaacacgaaggagggguccaacaucugccugacccgcaccgaccggggcugguacugcgacaacgccggcuccgugagcuucuucccccaggcggagaccugcaagguccaguccaaccgcguguucugcgacacgaugaacagccugacccucccguccgaggucaaccugugcaacguggacaucuucaaccccaaguacgacugcaagaucaugaccagcaagaccgacguguccagcuccgucaucacgagccugggggccaucguguccugcuacggcaagaccaagugcaccgccagcaacaagaaccgggggaucaucaagaccuucuccaacggcugcgacuacgugagcaacaagggcgucgacacgguguccguggggaacacccucuacugcgucaacaagcaggagggccagagccuguacgugaagggggagcccaucaucaacuucuacgacccccugguguucccgagcgacgaguucgacgccuccaucagccaggucaacgagaagaucaaccagucccucgccuucauccgcaagagcgacgagcugcugcacaacgugaacgcgggcaaguccaccaccaacaucaugaucaccacgaucaucaucgugaucaucgucauccuccugagccugaucgccguggggcuccugcuguacugcaaggcccgguccacccccgugacccugagcaaggaccagcucuccggcaucaacaacaucgccuucagcaacugaggacuagucccuguucccagagcccacuuuuuuuucuuuuuuugaaauaaaauagccugucuuucagaucucaaaggcucuuuucagagccaccaaaaaaaaaaaaaaaaaaaaaaaaaaaaaaaaaaaaaaaaaaaaaaaaaaaaaaaaaaaaaaaaaaaaaaaaaaaaaaaaaaaaaaaaaaaaaaaaaaaaa

SEQ ID NO: 21447 - RNA, 1880 nt, Artificial Sequence
  mRNA product Design a-1 (hSL-A100) comprising derived and/or modified sequence from HRSV(A2)__F_DSCav1_mut3 (opt1)
aggagagucccgcagucggcguccagcggcucugcuuguucgugugugugucguugcaggccuuauucaagcuuaccauggagcugcucauccugaaggccaacgccaucaccaccauccugacggcggugaccuucugcuucgccagcggccagaacaucaccgaggaguucuaccaguccacgugcagcgccgucuccaagggguaccucggcgcccugcgcaccgggugguacaccagcgugaucaccaucgagcuguccaacaucaaggagaucaagugcaacggcaccgacgccaaggugaagcucaucaagcaggagcuggacaaguacaagaacgcggucacggaccugcagcuccugaugcagagcacccccgccaccggguccggcagcgccaucugcuccggcguggccgugugcaagguccugcaccucgagggggaggugaacaagaucaagagcgcgcugcuguccaccaacaaggccguggucagccucuccaacggcgugagcgugcugacguucaagguccuggaccucaagaacuacaucgacaagcagcugcugccgauccucaacaagcaguccugcagcauccccaacaucgagaccgugaucgaguuccagcagaagaacaaccggcugcuggagaucacccgcgaguucuccgugaacgccggggucaccacgcccgugagcaccuacaugcucaccaacuccgagcugcugagccucaucaacgacaugcccaucaccaacgaccagaagaagcugaugagcaacaacgugcagaucguccggcagcaguccuacagcaucaugugcaucaucaaggaggaggugcuggccuacgugguccagcucccgcuguacggcgugaucgacacgcccugcuggaagcugcacaccagcccccucugcaccaccaacacgaaggagggguccaacaucugccugacccgcaccgaccggggcugguacugcgacaacgccggcuccgugagcuucuucccccaggcggagaccugcaagguccaguccaaccgcguguucugcgacacgaugaacagccugacccucccguccgaggucaaccugugcaacguggacaucuucaaccccaaguacgacugcaagaucaugaccagcaagaccgacguguccagcuccgucaucacgagccugggggccaucguguccugcuacggcaagaccaagugcaccgccagcaacaagaaccgggggaucaucaagaccuucuccaacggcugcgacuacgugagcaacaagggcgucgacacgguguccguggggaacacccucuacugcgucaacaagcaggagggccagagccuguacgugaagggggagcccaucaucaacuucuacgacccccugguguucccgagcgacgaguucgacgccuccaucagccaggucaacgagaagaucaaccagucccucgccuucauccgcaagagcgacgagcugcugcacaacgugaacgcgggcaaguccaccaccaacaucaugaucaccacgaucaucaucgugaucaucgucauccuccugagccugaucgccguggggcugcuccuguacugcaaggcccgguccacccccgugacccugagcaaggaccagcucuccggcaucaacaacaucgccuucagcaacugaggacuagucccuguucccagagcccacuuuuuuuucuuuuuuugaaauaaaauagccugucuuucagaucucaaaggcucuuuucagagccaccaaaaaaaaaaaaaaaaaaaaaaaaaaaaaaaaaaaaaaaaaaaaaaaaaaaaaaaaaaaaaaaaaaaaaaaaaaaaaaaaaaaaaaaaaaaaaaaaaaaaa

SEQ ID NO: 21448 - RNA, 1817 nt, Artificial Sequence
  mRNA product Design a-1 (hSL-A100) comprising derived and/or modified sequence from HRSV(A2)__F-del_DSCav1_mut3 (opt1)
aggagagucccgcagucggcguccagcggcucugcuuguucgugugugugucguugcaggccuuauucaagcuuaccauggagcugcucauccugaaggccaacgccaucaccaccauccugacggcggugaccuucugcuucgccagcggccagaacaucaccgaggaguucuaccaguccacgugcagcgccgucuccaagggguaccucggcgcccugcggaccggcugguacaccuccgugaucaccaucgagcugagcaacaucaaggagaucaagugcaacgggaccgacgccaaggugaagcucaucaagcaggagcuggacaaguacaagaacgcggucacggaccugcagcuccugaugcaguccaccccggcaaccggcuccggcuccgccaucugcagcggcgucgccgugugcaaggugcugcaccucgagggggaggucaacaagaucaagagcgcccugcuguccaccaacaaggccguggugagccucuccaacggcgucagcgugcugaccuucaaggugcuggaccucaagaacuacaucgacaagcagcugcugcccauccugaacaagcagagcugcuccauccccaacaucgagacggugaucgaguuccagcagaagaacaaccggcuccuggagaucacccgcgaguucagcgugaacgccggggucaccacccccguguccacguacaugcugaccaacagcgagcuccugucccugaucaacgacaugccgaucaccaacgaccagaagaagcucaugagcaacaacgugcagaucguccggcagcaguccuacagcaucaugugcaucaucaaggaggaggugcuggcguacgugguccagcugccccucuacggcgugaucgacacccccugcuggaagcugcacacgagcccccugugcaccaccaacaccaaggagggguccaacaucugccucacgcgcaccgaccggggcugguacugcgacaacgccggcagcgucuccuucuucccgcaggccgagaccugcaaggugcagagcaaccgcguguucugcgacaccaugaacucccugacgcugcccagcgagguaaaccucugcaacgucgacaucuucaaccccaaguacgacugcaagaucaugaccuccaagaccgacgugagcuccagcgugaucaccucccugggggccaucgucagcugcuacggcaagacgaagugcaccgccagcaacaagaaccgggggaucaucaagaccuucuccaacggcugcgacuacgugagcaacaagggcguggacaccguguccgucgggaacacccuguacugcgugaacaagcaggagggccagagccucuacgugaagggggagcccaucaucaacuucuacgacccgcuggucuuccccuccgacgaguucgacgcgagcaucucccaggugaacgagaagaucaaccagagccuggccuucauccgcaaguccgacgagcugcuccacaacgugaacgccggcaagagcacgaccaacaucaugaucaccaccaucaucaucgucaucaucgugauccugcugucccucaucgccguggggcugcugcucuacugcaaggcccggugaggacuagucccuguucccagagcccacuuuuuuuucuuuuuuugaaauaaaauagccugucuuucagaucucaaaggcucuuuucagagccaccaaaaaaaaaaaaaaaaaaaaaaaaaaaaaaaaaaaaaaaaaaaaaaaaaaaaaaaaaaaaaaaaaaaaaaaaaaaaaaaaaaaaaaaaaaaaaaaaaaaaa

SEQ ID NO: 21449 - RNA, 1817 nt, Artificial Sequence
  mRNA product Design a-1 (hSL-A100) comprising derived and/or modified sequence from HRSV(A2)__F-del_DSCav1_mut3 (opt1)
aggagagucccgcagucggcguccagcggcucugcuuguucgugugugugucguugcaggccuuauucaagcuuaccauggagcugcucauccugaaggccaacgccaucaccaccauccugacggcggugaccuucugcuucgccagcggccagaacaucaccgaggaguucuaccaguccacgugcagcgccgucuccaagggguaccucggcgcccugcgcaccgggugguacaccagcgugaucaccaucgagcuguccaacaucaaggagaucaagugcaacggcaccgacgccaaggugaagcucaucaagcaggagcuggacaaguacaagaacgcggucacggaccugcagcuccugaugcagagcacccccgccaccggguccggcagcgccaucugcuccggcguggccgugugcaagguccugcaccucgagggggaggugaacaagaucaagagcgcgcugcuguccaccaacaaggccguggucagccucuccaacggcgugagcgugcugacguucaagguccuggaccucaagaacuacaucgacaagcagcugcugccgauccucaacaagcaguccugcagcauccccaacaucgagaccgugaucgaguuccagcagaagaacaaccggcugcuggagaucacccgcgaguucuccgugaacgccggggucaccacgcccgugagcaccuacaugcucaccaacuccgagcugcugagccucaucaacgacaugcccaucaccaacgaccagaagaagcugaugagcaacaacgugcagaucguccggcagcaguccuacagcaucaugugcaucaucaaggaggaggugcuggccuacgugguccagcucccgcuguacggcgugaucgacacgcccugcuggaagcugcacaccagcccccucugcaccaccaacacgaaggagggguccaacaucugccugacccgcaccgaccggggcugguacugcgacaacgccggcuccgugagcuucuucccccaggcggagaccugcaagguccaguccaaccgcguguucugcgacacgaugaacagccugacccucccguccgaggucaaccugugcaacguggacaucuucaaccccaaguacgacugcaagaucaugaccagcaagaccgacguguccagcuccgucaucacgagccugggggccaucguguccugcuacggcaagaccaagugcaccgccagcaacaagaaccgggggaucaucaagaccuucuccaacggcugcgacuacgugagcaacaagggcgucgacacgguguccguggggaacacccucuacugcgucaacaagcaggagggccagagccuguacgugaagggggagcccaucaucaacuucuacgacccccugguguucccgagcgacgaguucgacgccuccaucagccaggucaacgagaagaucaaccagucccucgccuucauccgcaagagcgacgagcugcugcacaacgugaacgcgggcaaguccaccaccaacaucaugaucaccacgaucaucaucgugaucaucgucauccuccugagccugaucgccguggggcuccugcuguacugcaaggcccggugaggacuagucccuguucccagagcccacuuuuuuuucuuuuuuugaaauaaaauagccugucuuucagaucucaaaggcucuuuucagagccaccaaaaaaaaaaaaaaaaaaaaaaaaaaaaaaaaaaaaaaaaaaaaaaaaaaaaaaaaaaaaaaaaaaaaaaaaaaaaaaaaaaaaaaaaaaaaaaaaaaaaa

SEQ ID NO: 21450 - RNA, 1817 nt, Artificial Sequence
  mRNA product Design a-1 (hSL-A100) comprising derived and/or modified sequence from HRSV(A2)__F-del_DSCav1_mut3 (opt1)
aggagagucccgcagucggcguccagcggcucugcuuguucgugugugugucguugcaggccuuauucaagcuuaccauggagcugcucauccugaaggccaacgccaucaccaccauccugacggcggugaccuucugcuucgccagcggccagaacaucaccgaggaguucuaccaguccacgugcagcgccgucuccaagggguaccucggcgcccugcgcaccgggugguacaccagcgugaucaccaucgagcuguccaacaucaaggagaucaagugcaacggcaccgacgccaaggugaagcucaucaagcaggagcuggacaaguacaagaacgcggucacggaccugcagcuccugaugcagagcacccccgccaccggguccggcagcgccaucugcuccggcguggccgugugcaagguccugcaccucgagggggaggugaacaagaucaagagcgcgcugcuguccaccaacaaggccguggucagccucuccaacggcgugagcgugcugacguucaagguccuggaccucaagaacuacaucgacaagcagcugcugccgauccucaacaagcaguccugcagcauccccaacaucgagaccgugaucgaguuccagcagaagaacaaccggcugcuggagaucacccgcgaguucuccgugaacgccggggucaccacgcccgugagcaccuacaugcucaccaacuccgagcugcugagccucaucaacgacaugcccaucaccaacgaccagaagaagcugaugagcaacaacgugcagaucguccggcagcaguccuacagcaucaugugcaucaucaaggaggaggugcuggccuacgugguccagcucccgcuguacggcgugaucgacacgcccugcuggaagcugcacaccagcccccucugcaccaccaacacgaaggagggguccaacaucugccugacccgcaccgaccggggcugguacugcgacaacgccggcuccgugagcuucuucccccaggcggagaccugcaagguccaguccaaccgcguguucugcgacacgaugaacagccugacccucccguccgaggucaaccugugcaacguggacaucuucaaccccaaguacgacugcaagaucaugaccagcaagaccgacguguccagcuccgucaucacgagccugggggccaucguguccugcuacggcaagaccaagugcaccgccagcaacaagaaccgggggaucaucaagaccuucuccaacggcugcgacuacgugagcaacaagggcgucgacacgguguccguggggaacacccucuacugcgucaacaagcaggagggccagagccuguacgugaagggggagcccaucaucaacuucuacgacccccugguguucccgagcgacgaguucgacgccuccaucagccaggucaacgagaagaucaaccagucccucgccuucauccgcaagagcgacgagcugcugcacaacgugaacgcgggcaaguccaccaccaacaucaugaucaccacgaucaucaucgugaucaucgucauccuccugagccugaucgccguggggcugcuccuguacugcaaggcccggugaggacuagucccuguucccagagcccacuuuuuuuucuuuuuuugaaauaaaauagccugucuuucagaucucaaaggcucuuuucagagccaccaaaaaaaaaaaaaaaaaaaaaaaaaaaaaaaaaaaaaaaaaaaaaaaaaaaaaaaaaaaaaaaaaaaaaaaaaaaaaaaaaaaaaaaaaaaaaaaaaaaaa

SEQ ID NO: 21451 - RNA, 1880 nt, Artificial Sequence
  mRNA product Design a-1 (hSL-A100) comprising derived and/or modified sequence from HRSV(A2)__F_DSCav1_mut4 (opt1)
aggagagucccgcagucggcguccagcggcucugcuuguucgugugugugucguugcaggccuuauucaagcuuaccauggagcugcucauccugaaggccaacgccaucaccaccauccugacggcggugaccuucugcuucgccagcggccagaacaucaccgaggaguucuaccaguccacgugcagcgccgucuccaagggguaccucagcgcccugcggaccggcugguacaccuccgugaucaccaucgagcugagcaacaucaaggagaacaagugcaacgggaccgacgccaaggugaagcucaucaagcaggagcuggacaaguacaagaacgcggucacggagcugcagcuccugaugcaguccaccccggcaaccggcuccggcuccgccaucugcagcggcgucgccgugugcaaggugcugcaccucgagggggaggucaacaagaucaagagcgcccugcuguccaccaacaaggccguggugagccucuccaacggcgucagcgugcugaccuucaaggugcuggaccucaagaacuacaucgacaagcagcugcugcccauccugaacaagcagagcugcuccaucagcaacaucgagacggugaucgaguuccagcagaagaacaaccggcuccuggagaucacccgcgaguucagcgugaacgccggggucaccacccccguguccacguacaugcugaccaacagcgagcuccugucccugaucaacgacaugccgaucaccaacgaccagaagaagcucaugagcaacaacgugcagaucguccggcagcaguccuacagcaucaugugcaucaucaaggaggaggugcuggcguacgugguccagcugccccucuacggcgugaucgacacccccugcuggaagcugcacacgagcccccugugcaccaccaacaccaaggagggguccaacaucugccucacgcgcaccgaccggggcugguacugcgacaacgccggcagcgucuccuucuucccgcaggccgagaccugcaaggugcagagcaaccgcguguucugcgacaccaugaacucccggacgcugcccagcgagguaaaccucugcaacgucgacaucuucaaccccaaguacgacugcaagaucaugaccuccaagaccgacgugagcuccagcgugaucaccucccugggggccaucgucagcugcuacggcaagacgaagugcaccgccagcaacaagaaccgggggaucaucaagaccuucuccaacggcugcgacuacgugagcaacaagggcguggacaccguguccgucgggaacacccuguacugcgugaacaagcaggagggcaagagccucuacgugaagggggagcccaucaucaacuucuacgacccgcuggucuuccccuccgacgaguucgacgcgagcaucucccaggugaacgagaagaucaaccagagccuggccuucauccgcaaguccgacgagcugcuccacaacgugaacgccggcaagagcacgaccaacaucaugaucaccaccaucaucaucgucaucaucgugauccugcugucccucaucgccguggggcugcugcucuacugcaaggcccggagcacgcccgucacccuguccaaggaccagcugagcggcaucaacaacaucgcguucuccaacugaggacuagucccuguucccagagcccacuuuuuuuucuuuuuuugaaauaaaauagccugucuuucagaucucaaaggcucuuuucagagccaccaaaaaaaaaaaaaaaaaaaaaaaaaaaaaaaaaaaaaaaaaaaaaaaaaaaaaaaaaaaaaaaaaaaaaaaaaaaaaaaaaaaaaaaaaaaaaaaaaaaaa

SEQ ID NO: 21452 - RNA, 1880 nt, Artificial Sequence
  mRNA product Design a-1 (hSL-A100) comprising derived and/or modified sequence from HRSV(A2)__F_DSCav1_mut4 (opt1)
aggagagucccgcagucggcguccagcggcucugcuuguucgugugugugucguugcaggccuuauucaagcuuaccauggagcugcucauccugaaggccaacgccaucaccaccauccugacggcggugaccuucugcuucgccagcggccagaacaucaccgaggaguucuaccaguccacgugcagcgccgucuccaagggguaccucagcgcccugcgcaccggcugguacaccuccgugaucaccaucgagcugagcaacaucaaggagaacaagugcaacgggaccgacgccaaggugaagcucaucaagcaggagcuggacaaguacaagaacgcggucacggagcugcagcuccugaugcaguccacccccgccaccggcagcggguccgccaucugcagcggcguggccgugugcaagguccugcaccucgagggcgaggugaacaagaucaaguccgcgcugcugagcaccaacaaggccguggucucccucagcaacgggguguccgugcugacguucaagguccuggaccucaagaacuacaucgacaagcagcugcugccgauccucaacaagcagagcugcuccaucagcaacaucgagaccgugaucgaguuccagcagaagaacaaccggcugcuggagaucacccgcgaguucuccgugaacgccggcgucaccacgcccgugagcaccuacaugcucaccaacagcgagcugcugucccucaucaacgacaugcccaucaccaacgaccagaagaagcugaugagcaacaacgugcagaucguccggcagcaguccuacagcaucaugugcaucaucaaggaggaggugcuggccuacgugguccagcucccccuguacggggugaucgacacgccgugcuggaagcugcacaccagcccccucugcaccaccaacacgaaggagggcuccaacaucugccugacccgcaccgaccgggggugguacugcgacaacgccggcuccgugagcuucuucccccaggcggagaccugcaagguccaguccaaccgcguguucugcgacacgaugaacagccggacccuccccuccgaggucaaccugugcaacguggacaucuucaacccgaaguacgacugcaagaucaugaccagcaagaccgacguguccagcuccgucaucacgagccugggcgccaucguguccugcuacgggaagaccaagugcaccgccagcaacaagaaccggggcaucaucaagaccuucuccaacgggugcgacuacgugagcaacaagggcgucgacacggugagcgugggcaacacccucuacugcgucaacaagcaggaggggaagucccuguacgugaagggcgagcccaucaucaacuucuacgacccccugguguuccccagcgacgaguucgacgccuccaucagccaggucaacgagaagaucaaccagucccucgccuucauccgcaagagcgacgagcugcugcacaacgugaacgcggggaaguccaccaccaacaucaugaucaccacgaucaucaucgugaucaucgucauccuccugagccugaucgccgugggccuccugcuguacugcaaggcccgguccaccccggugacccugagcaaggaccagcucuccgggaucaacaacaucgccuucagcaacugaggacuagucccuguucccagagcccacuuuuuuuucuuuuuuugaaauaaaauagccugucuuucagaucucaaaggcucuuuucagagccaccaaaaaaaaaaaaaaaaaaaaaaaaaaaaaaaaaaaaaaaaaaaaaaaaaaaaaaaaaaaaaaaaaaaaaaaaaaaaaaaaaaaaaaaaaaaaaaaaaaaaa

SEQ ID NO: 21453 - RNA, 1880 nt, Artificial Sequence
  mRNA product Design a-1 (hSL-A100) comprising derived and/or modified sequence from HRSV(A2)__F_DSCav1_mut4 (opt1)
aggagagucccgcagucggcguccagcggcucugcuuguucgugugugugucguugcaggccuuauucaagcuuaccauggagcugcucauccugaaggccaacgccaucaccaccauccugacggcggugaccuucugcuucgccagcggccagaacaucaccgaggaguucuaccaguccacgugcagcgccgucuccaagggguaccucagcgcccugcgcaccggcugguacaccuccgugaucaccaucgagcugagcaacaucaaggagaacaagugcaacgggaccgacgccaaggugaagcucaucaagcaggagcuggacaaguacaagaacgcggucacggagcugcagcuccugaugcaguccacccccgccaccggcagcggguccgccaucugcagcggcguggccgugugcaagguccugcaccucgagggcgaggugaacaagaucaaguccgcgcugcugagcaccaacaaggccguggucucccucagcaacgggguguccgugcugacguucaagguccuggaccucaagaacuacaucgacaagcagcugcugccgauccucaacaagcagagcugcuccaucagcaacaucgagaccgugaucgaguuccagcagaagaacaaccggcugcuggagaucacccgcgaguucuccgugaacgccggcgucaccacgcccgugagcaccuacaugcucaccaacagcgagcugcugucccucaucaacgacaugcccaucaccaacgaccagaagaagcugaugagcaacaacgugcagaucguccggcagcaguccuacagcaucaugugcaucaucaaggaggaggugcuggccuacgugguccagcucccccuguacggggugaucgacacgccgugcuggaagcugcacaccagcccccucugcaccaccaacacgaaggagggcagcaacaucugccugacccgcaccgaccgggggugguacugcgacaacgccggcuccgugagcuucuucccccaggcggagaccugcaagguccaguccaaccgcguguucugcgacacgaugaacagccggacccugcccuccgaggucaaccucugcaacguggacaucuucaacccgaaguacgacugcaagaucaugaccagcaagaccgacguguccagcuccgucaucacgagccugggcgccaucguguccugcuacgggaagaccaagugcaccgccagcaacaagaaccgcggcaucaucaagaccuucuccaacgggugcgacuacgugagcaacaagggcgucgacacggugagcgugggcaacacccuguacugcgucaacaagcaggaggggaagucccucuacgugaagggcgagcccaucaucaacuucuacgacccccugguguuccccagcgacgaguucgacgccuccaucagccaggucaacgagaagaucaaccagucccuggccuucauccggaaguccgacgagcuccugcacaacgugaacgcggggaaguccaccaccaacaucaugaucaccacgaucaucaucgugaucaucgucauccugcucagccugaucgccgugggccugcugcucuacugcaaggcccgcuccaccccggugacccugagcaaggaccagcuguccgggaucaacaacaucgccuucagcaacugaggacuagucccuguucccagagcccacuuuuuuuucuuuuuuugaaauaaaauagccugucuuucagaucucaaaggcucuuuucagagccaccaaaaaaaaaaaaaaaaaaaaaaaaaaaaaaaaaaaaaaaaaaaaaaaaaaaaaaaaaaaaaaaaaaaaaaaaaaaaaaaaaaaaaaaaaaaaaaaaaaaaa

SEQ ID NO: 21454 - RNA, 1817 nt, Artificial Sequence
  mRNA product Design a-1 (hSL-A100) comprising derived and/or modified sequence from HRSV(A2)__F-del_DSCav1_mut4 (opt1)
aggagagucccgcagucggcguccagcggcucugcuuguucgugugugugucguugcaggccuuauucaagcuuaccauggagcugcucauccugaaggccaacgccaucaccaccauccugacggcggugaccuucugcuucgccagcggccagaacaucaccgaggaguucuaccaguccacgugcagcgccgucuccaagggguaccucagcgcccugcggaccggcugguacaccuccgugaucaccaucgagcugagcaacaucaaggagaacaagugcaacgggaccgacgccaaggugaagcucaucaagcaggagcuggacaaguacaagaacgcggucacggagcugcagcuccugaugcaguccaccccggcaaccggcuccggcuccgccaucugcagcggcgucgccgugugcaaggugcugcaccucgagggggaggucaacaagaucaagagcgcccugcuguccaccaacaaggccguggugagccucuccaacggcgucagcgugcugaccuucaaggugcuggaccucaagaacuacaucgacaagcagcugcugcccauccugaacaagcagagcugcuccaucagcaacaucgagacggugaucgaguuccagcagaagaacaaccggcuccuggagaucacccgcgaguucagcgugaacgccggggucaccacccccguguccacguacaugcugaccaacagcgagcuccugucccugaucaacgacaugccgaucaccaacgaccagaagaagcucaugagcaacaacgugcagaucguccggcagcaguccuacagcaucaugugcaucaucaaggaggaggugcuggcguacgugguccagcugccccucuacggcgugaucgacacccccugcuggaagcugcacacgagcccccugugcaccaccaacaccaaggagggguccaacaucugccucacgcgcaccgaccggggcugguacugcgacaacgccggcagcgucuccuucuucccgcaggccgagaccugcaaggugcagagcaaccgcguguucugcgacaccaugaacucccggacgcugcccagcgagguaaaccucugcaacgucgacaucuucaaccccaaguacgacugcaagaucaugaccuccaagaccgacgugagcuccagcgugaucaccucccugggggccaucgucagcugcuacggcaagacgaagugcaccgccagcaacaagaaccgggggaucaucaagaccuucuccaacggcugcgacuacgugagcaacaagggcguggacaccguguccgucgggaacacccuguacugcgugaacaagcaggagggcaagagccucuacgugaagggggagcccaucaucaacuucuacgacccgcuggucuuccccuccgacgaguucgacgcgagcaucucccaggugaacgagaagaucaaccagagccuggccuucauccgcaaguccgacgagcugcuccacaacgugaacgccggcaagagcacgaccaacaucaugaucaccaccaucaucaucgucaucaucgugauccugcugucccucaucgccguggggcugcugcucuacugcaaggcccggugaggacuagucccuguucccagagcccacuuuuuuuucuuuuuuugaaauaaaauagccugucuuucagaucucaaaggcucuuuucagagccaccaaaaaaaaaaaaaaaaaaaaaaaaaaaaaaaaaaaaaaaaaaaaaaaaaaaaaaaaaaaaaaaaaaaaaaaaaaaaaaaaaaaaaaaaaaaaaaaaaaaaa

SEQ ID NO: 21455 - RNA, 1817 nt, Artificial Sequence
  mRNA product Design a-1 (hSL-A100) comprising derived and/or modified sequence from HRSV(A2)__F-del_DSCav1_mut4 (opt1)
aggagagucccgcagucggcguccagcggcucugcuuguucgugugugugucguugcaggccuuauucaagcuuaccauggagcugcucauccugaaggccaacgccaucaccaccauccugacggcggugaccuucugcuucgccagcggccagaacaucaccgaggaguucuaccaguccacgugcagcgccgucuccaagggguaccucagcgcccugcgcaccggcugguacaccuccgugaucaccaucgagcugagcaacaucaaggagaacaagugcaacgggaccgacgccaaggugaagcucaucaagcaggagcuggacaaguacaagaacgcggucacggagcugcagcuccugaugcaguccacccccgccaccggcagcggguccgccaucugcagcggcguggccgugugcaagguccugcaccucgagggcgaggugaacaagaucaaguccgcgcugcugagcaccaacaaggccguggucucccucagcaacgggguguccgugcugacguucaagguccuggaccucaagaacuacaucgacaagcagcugcugccgauccucaacaagcagagcugcuccaucagcaacaucgagaccgugaucgaguuccagcagaagaacaaccggcugcuggagaucacccgcgaguucuccgugaacgccggcgucaccacgcccgugagcaccuacaugcucaccaacagcgagcugcugucccucaucaacgacaugcccaucaccaacgaccagaagaagcugaugagcaacaacgugcagaucguccggcagcaguccuacagcaucaugugcaucaucaaggaggaggugcuggccuacgugguccagcucccccuguacggggugaucgacacgccgugcuggaagcugcacaccagcccccucugcaccaccaacacgaaggagggcuccaacaucugccugacccgcaccgaccgggggugguacugcgacaacgccggcuccgugagcuucuucccccaggcggagaccugcaagguccaguccaaccgcguguucugcgacacgaugaacagccggacccuccccuccgaggucaaccugugcaacguggacaucuucaacccgaaguacgacugcaagaucaugaccagcaagaccgacguguccagcuccgucaucacgagccugggcgccaucguguccugcuacgggaagaccaagugcaccgccagcaacaagaaccggggcaucaucaagaccuucuccaacgggugcgacuacgugagcaacaagggcgucgacacggugagcgugggcaacacccucuacugcgucaacaagcaggaggggaagucccuguacgugaagggcgagcccaucaucaacuucuacgacccccugguguuccccagcgacgaguucgacgccuccaucagccaggucaacgagaagaucaaccagucccucgccuucauccgcaagagcgacgagcugcugcacaacgugaacgcggggaaguccaccaccaacaucaugaucaccacgaucaucaucgugaucaucgucauccuccugagccugaucgccgugggccuccugcuguacugcaaggcccggugaggacuagucccuguucccagagcccacuuuuuuuucuuuuuuugaaauaaaauagccugucuuucagaucucaaaggcucuuuucagagccaccaaaaaaaaaaaaaaaaaaaaaaaaaaaaaaaaaaaaaaaaaaaaaaaaaaaaaaaaaaaaaaaaaaaaaaaaaaaaaaaaaaaaaaaaaaaaaaaaaaaaa

SEQ ID NO: 21456 - RNA, 1817 nt, Artificial Sequence
  mRNA product Design a-1 (hSL-A100) comprising derived and/or modified sequence from HRSV(A2)__F-del_DSCav1_mut4 (opt1)
aggagagucccgcagucggcguccagcggcucugcuuguucgugugugugucguugcaggccuuauucaagcuuaccauggagcugcucauccugaaggccaacgccaucaccaccauccugacggcggugaccuucugcuucgccagcggccagaacaucaccgaggaguucuaccaguccacgugcagcgccgucuccaagggguaccucagcgcccugcgcaccggcugguacaccuccgugaucaccaucgagcugagcaacaucaaggagaacaagugcaacgggaccgacgccaaggugaagcucaucaagcaggagcuggacaaguacaagaacgcggucacggagcugcagcuccugaugcaguccacccccgccaccggcagcggguccgccaucugcagcggcguggccgugugcaagguccugcaccucgagggcgaggugaacaagaucaaguccgcgcugcugagcaccaacaaggccguggucucccucagcaacgggguguccgugcugacguucaagguccuggaccucaagaacuacaucgacaagcagcugcugccgauccucaacaagcagagcugcuccaucagcaacaucgagaccgugaucgaguuccagcagaagaacaaccggcugcuggagaucacccgcgaguucuccgugaacgccggcgucaccacgcccgugagcaccuacaugcucaccaacagcgagcugcugucccucaucaacgacaugcccaucaccaacgaccagaagaagcugaugagcaacaacgugcagaucguccggcagcaguccuacagcaucaugugcaucaucaaggaggaggugcuggccuacgugguccagcucccccuguacggggugaucgacacgccgugcuggaagcugcacaccagcccccucugcaccaccaacacgaaggagggcagcaacaucugccugacccgcaccgaccgggggugguacugcgacaacgccggcuccgugagcuucuucccccaggcggagaccugcaagguccaguccaaccgcguguucugcgacacgaugaacagccggacccugcccuccgaggucaaccucugcaacguggacaucuucaacccgaaguacgacugcaagaucaugaccagcaagaccgacguguccagcuccgucaucacgagccugggcgccaucguguccugcuacgggaagaccaagugcaccgccagcaacaagaaccgcggcaucaucaagaccuucuccaacgggugcgacuacgugagcaacaagggcgucgacacggugagcgugggcaacacccuguacugcgucaacaagcaggaggggaagucccucuacgugaagggcgagcccaucaucaacuucuacgacccccugguguuccccagcgacgaguucgacgccuccaucagccaggucaacgagaagaucaaccagucccuggccuucauccggaaguccgacgagcuccugcacaacgugaacgcggggaaguccaccaccaacaucaugaucaccacgaucaucaucgugaucaucgucauccugcucagccugaucgccgugggccugcugcucuacugcaaggcccgcugaggacuagucccuguucccagagcccacuuuuuuuucuuuuuuugaaauaaaauagccugucuuucagaucucaaaggcucuuuucagagccaccaaaaaaaaaaaaaaaaaaaaaaaaaaaaaaaaaaaaaaaaaaaaaaaaaaaaaaaaaaaaaaaaaaaaaaaaaaaaaaaaaaaaaaaaaaaaaaaaaaaaa

SEQ ID NO: 21457 - RNA, 1883 nt, Artificial Sequence
  mRNA product Design a-1 (hSL-A100) comprising derived and/or modified sequence from HRSV(A2)__F_DSCav1_mut5 (opt1)
aggagagucccgcagucggcguccagcggcucugcuuguucgugugugugucguugcaggccuuauucaagcuuaccauggagcugcucauccugaaggccaacgccaucaccaccauccugacggcggugaccuucugcuucgccagcggccagaacaucaccgaggaguucuaccaguccacgugcagcgccgucuccaagggguaccucagcgcccugcggaccggcugguacaccuccgugaucaccaucgagcugagcaacaucaaggagaacaagugcaacgggaccgacgccaaggugaagcucaucaagcaggagcuggacaaguacaagaacgcggucacggagcugcagcuccugaugcaguccaccccggcaaccggcuccggcuccgccaucgcgagcggcgucgccgugugcaaggugcugcaccucgagggggaggucaacaagaucaagagcgcccugcuguccaccaacaaggccguggugagccucuccggcugcggcgucagcgugcugaccuucaaggugcuggaccucaagaacuacaucgacaagcagcugcugcccauccugaacaagcagagcugcuccaucagcaacaucgagacggugaucgaguuccagcagaagaacaaccggcuccuggagaucacccgcgaguucagcgugaacgccggggucaccacccccguguccacguacaugcugaccaacagcgagcuccugucccugaucaacgacaugccgaucaccaacgaccagaagaagcucaugagcaacaacgugcagaucguccggcagcaguccuacagcaucaugugcaucaucaaggaggaggugcuggcguacgugguccagcugccccucuacggcgugaucgacacccccugcuggaagcugcacacgagcccccugugcaccaccaacaccaaggagggguccaacaucugccucacgcgcaccgaccggggcugguacugcgacaacgccggcagcgucuccuucuucccgcaggccgagaccugcaaggugcagagcaaccgcguguucugcgacaccaugaacucccggacgcugcccagcgagguaaaccucugcaacgucgacaucuucaaccccaaguacgacugcaagaucaugaccuccaagaccgacgugagcuccagcgugaucaccucccugggggccaucgucagcugcuacggcaagacgaagugcaccgccagcaacaagugccgggggaucaucaagaccuucuccaacggcugcgacuacgugagcaacaagggcguggacaccguguccgucgggaacacccuguacuacgugaacaagcaggagggcaagagccucuacgugaagggggagcccaucaucaacuucuacgacccgcuggucuuccccuccgacgaguucgacgcgagcaucucccaggugaacgagaagaucaaccagagccuggccuucauccgcaaguccgacgagcugcuccacaacgugaacgccggcaagagcacgaccaacaucaugaucaccaccaucaucaucgucaucaucgugauccugcugucccucaucgccguggggcugcugcucuacugcaaggcccggagcacgcccgucacccuguccaaggaccagcugagcggcaucaacaacaucgcguucuccaacugaggacuagucccuguucccagagcccacuuuuuuuucuuuuuuugaaauaaaauagccugucuuucagaucucaaaggcucuuuucagagccaccaaaaaaaaaaaaaaaaaaaaaaaaaaaaaaaaaaaaaaaaaaaaaaaaaaaaaaaaaaaaaaaaaaaaaaaaaaaaaaaaaaaaaaaaaaaaaaaaaaaaa

SEQ ID NO: 21458 - RNA, 1883 nt, Artificial Sequence
  mRNA product Design a-1 (hSL-A100) comprising derived and/or modified sequence from HRSV(A2)__F_DSCav1_mut5 (opt1)
aggagagucccgcagucggcguccagcggcucugcuuguucgugugugugucguugcaggccuuauucaagcuuaccauggagcugcucauccugaaggccaacgccaucaccaccauccugacggcggugaccuucugcuucgccagcggccagaacaucaccgaggaguucuaccaguccacgugcagcgccgucuccaagggguaccucagcgcccugcgcaccggcugguacaccuccgugaucaccaucgagcugagcaacaucaaggagaacaagugcaacgggaccgacgccaaggugaagcucaucaagcaggagcuggacaaguacaagaacgcggucacggagcugcagcuccugaugcaguccacccccgccaccggcagcggguccgccaucgccagcggcguggcggugugcaagguccugcaccucgagggcgaggugaacaagaucaaguccgcccugcugagcaccaacaaggccguggucucccucagcgggugcggcguguccgugcugacguucaagguccuggaccucaagaacuacaucgacaagcagcugcugccgauccucaacaagcagagcugcuccaucagcaacaucgagaccgugaucgaguuccagcagaagaacaaccggcugcuggagaucacccgcgaguucuccgugaacgccggggucaccacgcccgugagcaccuacaugcucaccaacagcgagcugcugucccucaucaacgacaugcccaucaccaacgaccagaagaagcugaugagcaacaacgugcagaucguccggcagcaguccuacagcaucaugugcaucaucaaggaggaggugcuggccuacgugguccagcucccccuguacggcgugaucgacacgccgugcuggaagcugcacaccagcccccucugcaccaccaacacgaaggagggguccaacaucugccugacccgcaccgaccggggcugguacugcgacaacgcgggcuccgugagcuucuucccccaggccgagaccugcaagguccaguccaaccgcguguucugcgacacgaugaacagccggacccuccccuccgaggucaaccugugcaacguggacaucuucaacccgaaguacgacugcaagaucaugaccagcaagaccgacguguccagcuccgucaucacgagccugggggccaucguguccugcuacggcaagaccaagugcaccgccagcaacaagugccgggggaucaucaagaccuucuccaacggcugcgacuacgugagcaacaagggcgucgacacggugagcguggggaacacccucuacuacgucaacaagcaggagggcaagucccuguacgugaagggggagcccaucaucaacuucuacgacccccugguguuccccagcgacgaguucgacgccuccaucagccaggucaacgagaagaucaaccagucccucgcguucauccgcaagagcgacgagcugcugcacaacgugaacgccggcaaguccaccaccaacaucaugaucaccacgaucaucaucgugaucaucgucauccuccugagccugaucgccguggggcuccugcuguacugcaaggcccgguccaccccggugacccugagcaaggaccagcucuccggcaucaacaacaucgccuucagcaacugaggacuagucccuguucccagagcccacuuuuuuuucuuuuuuugaaauaaaauagccugucuuucagaucucaaaggcucuuuucagagccaccaaaaaaaaaaaaaaaaaaaaaaaaaaaaaaaaaaaaaaaaaaaaaaaaaaaaaaaaaaaaaaaaaaaaaaaaaaaaaaaaaaaaaaaaaaaaaaaaaaaaa

SEQ ID NO: 21459 - RNA, 1883 nt, Artificial Sequence
  mRNA product Design a-1 (hSL-A100) comprising derived and/or modified sequence from HRSV(A2)__F_DSCav1_mut5 (opt1)
aggagagucccgcagucggcguccagcggcucugcuuguucgugugugugucguugcaggccuuauucaagcuuaccauggagcugcucauccugaaggccaacgccaucaccaccauccugacggcggugaccuucugcuucgccagcggccagaacaucaccgaggaguucuaccaguccacgugcagcgccgucuccaagggguaccucagcgcccugcgcaccggcugguacaccuccgugaucaccaucgagcugagcaacaucaaggagaacaagugcaacgggaccgacgccaaggugaagcucaucaagcaggagcuggacaaguacaagaacgcggucacggagcugcagcuccugaugcaguccacccccgccaccggcagcggguccgccaucgccagcggcguggcggugugcaagguccugcaccucgagggcgaggugaacaagaucaaguccgcccugcugagcaccaacaaggccguggucucccucagcgggugcggcguguccgugcugacguucaagguccuggaccucaagaacuacaucgacaagcagcugcugccgauccucaacaagcagagcugcuccaucagcaacaucgagaccgugaucgaguuccagcagaagaacaaccggcugcuggagaucacccgcgaguucuccgugaacgccggggucaccacgcccgugagcaccuacaugcucaccaacagcgagcugcugucccucaucaacgacaugcccaucaccaacgaccagaagaagcugaugagcaacaacgugcagaucguccggcagcaguccuacagcaucaugugcaucaucaaggaggaggugcuggccuacgugguccagcucccccuguacggcgugaucgacacgccgugcuggaagcugcacaccagcccccucugcaccaccaacacgaaggaggggagcaacaucugccugacccgcaccgaccggggcugguacugcgacaacgcgggcuccgugagcuucuucccccaggccgagaccugcaagguccaguccaaccgcguguucugcgacacgaugaacagccggacccugcccuccgaggucaaccucugcaacguggacaucuucaacccgaaguacgacugcaagaucaugaccagcaagaccgacguguccagcuccgucaucacgagccugggggccaucguguccugcuacggcaagaccaagugcaccgccagcaacaagugccgcgggaucaucaagaccuucuccaacggcugcgacuacgugagcaacaagggcgucgacacggugagcguggggaacacccuguacuacgucaacaagcaggagggcaagucccucuacgugaagggggagcccaucaucaacuucuacgacccccugguguuccccagcgacgaguucgacgccuccaucagccaggucaacgagaagaucaaccagucccuggcguucauccggaaguccgacgagcuccugcacaacgugaacgccggcaaguccaccaccaacaucaugaucaccacgaucaucaucgugaucaucgucauccugcucagccugaucgccguggggcugcugcucuacugcaaggcccgcuccaccccggugacccugagcaaggaccagcuguccggcaucaacaacaucgccuucagcaacugaggacuagucccuguucccagagcccacuuuuuuuucuuuuuuugaaauaaaauagccugucuuucagaucucaaaggcucuuuucagagccaccaaaaaaaaaaaaaaaaaaaaaaaaaaaaaaaaaaaaaaaaaaaaaaaaaaaaaaaaaaaaaaaaaaaaaaaaaaaaaaaaaaaaaaaaaaaaaaaaaaaaa

SEQ ID NO: 21460 - RNA, 1820 nt, Artificial Sequence
  mRNA product Design a-1 (hSL-A100) comprising derived and/or modified sequence from HRSV(A2)__F-del_DSCav1_mut5 (opt1)
aggagagucccgcagucggcguccagcggcucugcuuguucgugugugugucguugcaggccuuauucaagcuuaccauggagcugcucauccugaaggccaacgccaucaccaccauccugacggcggugaccuucugcuucgccagcggccagaacaucaccgaggaguucuaccaguccacgugcagcgccgucuccaagggguaccucagcgcccugcggaccggcugguacaccuccgugaucaccaucgagcugagcaacaucaaggagaacaagugcaacgggaccgacgccaaggugaagcucaucaagcaggagcuggacaaguacaagaacgcggucacggagcugcagcuccugaugcaguccaccccggcaaccggcuccggcuccgccaucgcgagcggcgucgccgugugcaaggugcugcaccucgagggggaggucaacaagaucaagagcgcccugcuguccaccaacaaggccguggugagccucuccggcugcggcgucagcgugcugaccuucaaggugcuggaccucaagaacuacaucgacaagcagcugcugcccauccugaacaagcagagcugcuccaucagcaacaucgagacggugaucgaguuccagcagaagaacaaccggcuccuggagaucacccgcgaguucagcgugaacgccggggucaccacccccguguccacguacaugcugaccaacagcgagcuccugucccugaucaacgacaugccgaucaccaacgaccagaagaagcucaugagcaacaacgugcagaucguccggcagcaguccuacagcaucaugugcaucaucaaggaggaggugcuggcguacgugguccagcugccccucuacggcgugaucgacacccccugcuggaagcugcacacgagcccccugugcaccaccaacaccaaggagggguccaacaucugccucacgcgcaccgaccggggcugguacugcgacaacgccggcagcgucuccuucuucccgcaggccgagaccugcaaggugcagagcaaccgcguguucugcgacaccaugaacucccggacgcugcccagcgagguaaaccucugcaacgucgacaucuucaaccccaaguacgacugcaagaucaugaccuccaagaccgacgugagcuccagcgugaucaccucccugggggccaucgucagcugcuacggcaagacgaagugcaccgccagcaacaagugccgggggaucaucaagaccuucuccaacggcugcgacuacgugagcaacaagggcguggacaccguguccgucgggaacacccuguacuacgugaacaagcaggagggcaagagccucuacgugaagggggagcccaucaucaacuucuacgacccgcuggucuuccccuccgacgaguucgacgcgagcaucucccaggugaacgagaagaucaaccagagccuggccuucauccgcaaguccgacgagcugcuccacaacgugaacgccggcaagagcacgaccaacaucaugaucaccaccaucaucaucgucaucaucgugauccugcugucccucaucgccguggggcugcugcucuacugcaaggcccggugaggacuagucccuguucccagagcccacuuuuuuuucuuuuuuugaaauaaaauagccugucuuucagaucucaaaggcucuuuucagagccaccaaaaaaaaaaaaaaaaaaaaaaaaaaaaaaaaaaaaaaaaaaaaaaaaaaaaaaaaaaaaaaaaaaaaaaaaaaaaaaaaaaaaaaaaaaaaaaaaaaaaa

SEQ ID NO: 21461 - RNA, 1820 nt, Artificial Sequence
  mRNA product Design a-1 (hSL-A100) comprising derived and/or modified sequence from HRSV(A2)__F-del_DSCav1_mut5 (opt1)
aggagagucccgcagucggcguccagcggcucugcuuguucgugugugugucguugcaggccuuauucaagcuuaccauggagcugcucauccugaaggccaacgccaucaccaccauccugacggcggugaccuucugcuucgccagcggccagaacaucaccgaggaguucuaccaguccacgugcagcgccgucuccaagggguaccucagcgcccugcgcaccggcugguacaccuccgugaucaccaucgagcugagcaacaucaaggagaacaagugcaacgggaccgacgccaaggugaagcucaucaagcaggagcuggacaaguacaagaacgcggucacggagcugcagcuccugaugcaguccacccccgccaccggcagcggguccgccaucgccagcggcguggcggugugcaagguccugcaccucgagggcgaggugaacaagaucaaguccgcccugcugagcaccaacaaggccguggucucccucagcgggugcggcguguccgugcugacguucaagguccuggaccucaagaacuacaucgacaagcagcugcugccgauccucaacaagcagagcugcuccaucagcaacaucgagaccgugaucgaguuccagcagaagaacaaccggcugcuggagaucacccgcgaguucuccgugaacgccggggucaccacgcccgugagcaccuacaugcucaccaacagcgagcugcugucccucaucaacgacaugcccaucaccaacgaccagaagaagcugaugagcaacaacgugcagaucguccggcagcaguccuacagcaucaugugcaucaucaaggaggaggugcuggccuacgugguccagcucccccuguacggcgugaucgacacgccgugcuggaagcugcacaccagcccccucugcaccaccaacacgaaggagggguccaacaucugccugacccgcaccgaccggggcugguacugcgacaacgcgggcuccgugagcuucuucccccaggccgagaccugcaagguccaguccaaccgcguguucugcgacacgaugaacagccggacccuccccuccgaggucaaccugugcaacguggacaucuucaacccgaaguacgacugcaagaucaugaccagcaagaccgacguguccagcuccgucaucacgagccugggggccaucguguccugcuacggcaagaccaagugcaccgccagcaacaagugccgggggaucaucaagaccuucuccaacggcugcgacuacgugagcaacaagggcgucgacacggugagcguggggaacacccucuacuacgucaacaagcaggagggcaagucccuguacgugaagggggagcccaucaucaacuucuacgacccccugguguuccccagcgacgaguucgacgccuccaucagccaggucaacgagaagaucaaccagucccucgcguucauccgcaagagcgacgagcugcugcacaacgugaacgccggcaaguccaccaccaacaucaugaucaccacgaucaucaucgugaucaucgucauccuccugagccugaucgccguggggcuccugcuguacugcaaggcccggugaggacuagucccuguucccagagcccacuuuuuuuucuuuuuuugaaauaaaauagccugucuuucagaucucaaaggcucuuuucagagccaccaaaaaaaaaaaaaaaaaaaaaaaaaaaaaaaaaaaaaaaaaaaaaaaaaaaaaaaaaaaaaaaaaaaaaaaaaaaaaaaaaaaaaaaaaaaaaaaaaaaaa

SEQ ID NO: 21462 - RNA, 1820 nt, Artificial Sequence
  mRNA product Design a-1 (hSL-A100) comprising derived and/or modified sequence from HRSV(A2)__F-del_DSCav1_mut5 (opt1)
aggagagucccgcagucggcguccagcggcucugcuuguucgugugugugucguugcaggccuuauucaagcuuaccauggagcugcucauccugaaggccaacgccaucaccaccauccugacggcggugaccuucugcuucgccagcggccagaacaucaccgaggaguucuaccaguccacgugcagcgccgucuccaagggguaccucagcgcccugcgcaccggcugguacaccuccgugaucaccaucgagcugagcaacaucaaggagaacaagugcaacgggaccgacgccaaggugaagcucaucaagcaggagcuggacaaguacaagaacgcggucacggagcugcagcuccugaugcaguccacccccgccaccggcagcggguccgccaucgccagcggcguggcggugugcaagguccugcaccucgagggcgaggugaacaagaucaaguccgcccugcugagcaccaacaaggccguggucucccucagcgggugcggcguguccgugcugacguucaagguccuggaccucaagaacuacaucgacaagcagcugcugccgauccucaacaagcagagcugcuccaucagcaacaucgagaccgugaucgaguuccagcagaagaacaaccggcugcuggagaucacccgcgaguucuccgugaacgccggggucaccacgcccgugagcaccuacaugcucaccaacagcgagcugcugucccucaucaacgacaugcccaucaccaacgaccagaagaagcugaugagcaacaacgugcagaucguccggcagcaguccuacagcaucaugugcaucaucaaggaggaggugcuggccuacgugguccagcucccccuguacggcgugaucgacacgccgugcuggaagcugcacaccagcccccucugcaccaccaacacgaaggaggggagcaacaucugccugacccgcaccgaccggggcugguacugcgacaacgcgggcuccgugagcuucuucccccaggccgagaccugcaagguccaguccaaccgcguguucugcgacacgaugaacagccggacccugcccuccgaggucaaccucugcaacguggacaucuucaacccgaaguacgacugcaagaucaugaccagcaagaccgacguguccagcuccgucaucacgagccugggggccaucguguccugcuacggcaagaccaagugcaccgccagcaacaagugccgcgggaucaucaagaccuucuccaacggcugcgacuacgugagcaacaagggcgucgacacggugagcguggggaacacccuguacuacgucaacaagcaggagggcaagucccucuacgugaagggggagcccaucaucaacuucuacgacccccugguguuccccagcgacgaguucgacgccuccaucagccaggucaacgagaagaucaaccagucccuggcguucauccggaaguccgacgagcuccugcacaacgugaacgccggcaaguccaccaccaacaucaugaucaccacgaucaucaucgugaucaucgucauccugcucagccugaucgccguggggcugcugcucuacugcaaggcccgcugaggacuagucccuguucccagagcccacuuuuuuuucuuuuuuugaaauaaaauagccugucuuucagaucucaaaggcucuuuucagagccaccaaaaaaaaaaaaaaaaaaaaaaaaaaaaaaaaaaaaaaaaaaaaaaaaaaaaaaaaaaaaaaaaaaaaaaaaaaaaaaaaaaaaaaaaaaaaaaaaaaaaa

SEQ ID NO: 21463 - RNA, 1880 nt, Artificial Sequence
  mRNA product Design a-1 (hSL-A100) comprising derived and/or modified sequence from HRSV(A2)__F_DSCav1_mut6 (opt1)
aggagagucccgcagucggcguccagcggcucugcuuguucgugugugugucguugcaggccuuauucaagcuuaccauggagcugcucauccugaaggccaacgccaucaccaccauccugacggcggugaccuucugcuucgccagcggccagaacaucaccgaggaguucuaccaguccacgugcagcgccgucuccaagggguaccucggcgcccugcggaccggcugguacaccuccgugaucaccaucgagcugagcaacaucaaggagaacaagugcaacgggaccgacgccaaggugaagcucaucaagcaggagcuggacaaguacaagaacgcggucacggaccugcagaugcugaugugcuccaccccggcaaccggcuccggcuccgccaucgcgagcggcgucgccgugugcaaggugcugcaccucgagggggaggucaacaagaucaagagcgcccugcuguccaccaacaaggccguggugagccucuccaacggcgucagcgugcugaccuucaaggugcuggaccucaagaacuacaucgacaagcagcugcugcccauccugaacaagcagagcugcuccauccccaaccccgagacggugauggaguuccagcagaagaacaaccggcuccuggagaucacccgcgaguucagcgugaacgccggggucaccacccccguguccacguacaugcugaccaacagcgagcuccugucccugaucaacgacaugccgaucaccaacgaccagaagaagcucaugagcaacaacgugcagaucguccggcagcaguccuacagcaucaugugcaucaucaaggaggaggugcuggcguacgugguccagcugccccucuacggcgugaucgacacccccugcuggaagcugcacacgagcccccugugcaccaccaacaccaaggagggguccaacaucugccucacgcgcaccgaccggggcugguacugcgacaacgccggcagcgucuccuucuucccgcaggccgagaccugcaaggugugcagcaaccgcguguucugcgacaccaugaacucccugacgcugcccagcgagguaaaccucugcaacgucgacaucuucaaccccaaguacgacugcaagaucaugaccuccaagaccgacgugagcuccagcgugaucaccucccugggggccaucgucagcugcuacggcaagacgaagugcaccgccagcaacaagaacaaggggaucaucaagaccuucuccaacggcugcgacuacgugagcaacaagggcguggacaccguguccgucgggaacacccuguacuacgugaacaagcaggagggccagagccucuacgugaagggggagcccaucaucaacuucuacgacccgcuggucuuccccuccgacgaguucgacgcgagcaucucccaggugaacgagaagaucaaccagagccuggccuucauccgcaaguccgacgagcugcuccacaacgugaacgccggcaagagcacgaccaacaucaugaucaccaccaucaucaucgucaucaucgugauccugcugucccucaucgccguggggcugcugcucuacugcaaggcccggagcacgcccgucacccuguccaaggaccagcugagcggcaucaacaacaucgcguucuccaacugaggacuagucccuguucccagagcccacuuuuuuuucuuuuuuugaaauaaaauagccugucuuucagaucucaaaggcucuuuucagagccaccaaaaaaaaaaaaaaaaaaaaaaaaaaaaaaaaaaaaaaaaaaaaaaaaaaaaaaaaaaaaaaaaaaaaaaaaaaaaaaaaaaaaaaaaaaaaaaaaaaaaa

SEQ ID NO: 21464 - RNA, 1880 nt, Artificial Sequence
  mRNA product Design a-1 (hSL-A100) comprising derived and/or modified sequence from HRSV(A2)__F_DSCav1_mut6 (opt1)
aggagagucccgcagucggcguccagcggcucugcuuguucgugugugugucguugcaggccuuauucaagcuuaccauggagcugcucauccugaaggccaacgccaucaccaccauccugacggcggugaccuucugcuucgccagcggccagaacaucaccgaggaguucuaccaguccacgugcagcgccgucuccaagggguaccucggcgcccugcgcaccgggugguacaccagcgugaucaccaucgagcuguccaacaucaaggagaacaagugcaacggcaccgacgccaaggugaagcucaucaagcaggagcuggacaaguacaagaacgcggucacggaccugcagaugcucaugugcagcacccccgccaccggguccggcagcgccaucgccuccggcguggcggugugcaagguccugcaccuggagggggaggugaacaagaucaagagcgcccuccuguccaccaacaaggccguggucagccuguccaacggcgugagcgugcucacguucaagguccuggaccugaagaacuacaucgacaagcagcuccugccgauccugaacaagcaguccugcagcauccccaaccccgagaccgugauggaguuccagcagaagaacaaccggcuccuggagaucacccgcgaguucuccgugaacgccggggucaccacgcccgugagcaccuacaugcugaccaacuccgagcuccugagccugaucaacgacaugccgaucaccaacgaccagaagaagcucaugagcaacaacgugcagaucguccggcagcaguccuacagcaucaugugcaucaucaaggaggaggugcuggccuacgugguccagcugccccucuacggcgugaucgacacgcccugcuggaagcugcacaccagcccccugugcaccaccaacacgaaggaggggagcaacaucugccucacccgcaccgaccggggcugguacugcgacaacgcgggcuccgugagcuucuucccgcaggccgagaccugcaaggucugcuccaaccgcguguucugcgacacgaugaacagccugacccugcccuccgaggucaaccucugcaacguggacaucuucaaccccaaguacgacugcaagaucaugaccagcaagaccgacguguccagcuccgucaucacgagccugggggccaucguguccugcuacggcaagaccaagugcaccgccagcaacaagaacaaggggaucaucaagaccuucuccaacggcugcgacuacgugagcaacaagggcgucgacacgguguccguggggaacacccuguacuacgucaacaagcaggagggccagagccucuacgugaagggggagcccaucaucaacuucuacgacccgcugguguuccccagcgacgaguucgacgccuccaucagccaggucaacgagaagaucaaccagucccuggcguucauccggaaguccgacgagcuccugcacaacgugaacgccggcaaguccaccaccaacaucaugaucaccacgaucaucaucgugaucaucgucauccugcucagccugaucgccguggggcugcuccuguacugcaaggcccgcuccacccccgugacccugagcaaggaccagcuguccggcaucaacaacaucgccuucagcaacugaggacuagucccuguucccagagcccacuuuuuuuucuuuuuuugaaauaaaauagccugucuuucagaucucaaaggcucuuuucagagccaccaaaaaaaaaaaaaaaaaaaaaaaaaaaaaaaaaaaaaaaaaaaaaaaaaaaaaaaaaaaaaaaaaaaaaaaaaaaaaaaaaaaaaaaaaaaaaaaaaaaaa

SEQ ID NO: 21465 - RNA, 1880 nt, Artificial Sequence
  mRNA product Design a-1 (hSL-A100) comprising derived and/or modified sequence from HRSV(A2)__F_DSCav1_mut6 (opt1)
aggagagucccgcagucggcguccagcggcucugcuuguucgugugugugucguugcaggccuuauucaagcuuaccauggagcugcucauccugaaggccaacgccaucaccaccauccugacggcggugaccuucugcuucgccagcggccagaacaucaccgaggaguucuaccaguccacgugcagcgccgucuccaagggguaccucggcgcccugcgcaccgggugguacaccagcgugaucaccaucgagcuguccaacaucaaggagaacaagugcaacggcaccgacgccaaggugaagcucaucaagcaggagcuggacaaguacaagaacgcggucacggaccugcagaugcucaugugcagcacccccgccaccggguccggcagcgccaucgccuccggcguggcggugugcaagguccugcaccuggagggggaggugaacaagaucaagagcgcccuccuguccaccaacaaggccguggucagccuguccaacggcgugagcgugcucacguucaagguccuggaccugaagaacuacaucgacaagcagcuccugccgauccugaacaagcaguccugcagcauccccaaccccgagaccgugauggaguuccagcagaagaacaaccggcuccuggagaucacccgcgaguucuccgugaacgccggggucaccacgcccgugagcaccuacaugcugaccaacuccgagcuccugagccugaucaacgacaugccgaucaccaacgaccagaagaagcucaugagcaacaacgugcagaucguccggcagcaguccuacagcaucaugugcaucaucaaggaggaggugcuggccuacgugguccagcugccccucuacggcgugaucgacacgcccugcuggaagcugcacaccagcccccugugcaccaccaacacgaaggaggggagcaacaucugccucacccgcaccgaccggggcugguacugcgacaacgcgggcuccgugagcuucuucccgcaggccgagaccugcaaggucugcuccaaccgcguguucugcgacacgaugaacagccugacccugcccuccgaggucaaccucugcaacguggacaucuucaaccccaaguacgacugcaagaucaugaccagcaagaccgacguguccagcuccgucaucacgagccugggggccaucguguccugcuacggcaagaccaagugcaccgccagcaacaagaacaaggggaucaucaagaccuucuccaacggcugcgacuacgugagcaacaagggcgucgacacgguguccguggggaacacccuguacuacgucaacaagcaggagggccagagccucuacgugaagggggagcccaucaucaacuucuacgacccgcugguguuccccagcgacgaguucgacgccuccaucagccaggucaacgagaagaucaaccagucccuggcguucauccggaaguccgacgagcuccugcacaacgugaacgccggcaaguccaccaccaacaucaugaucaccacgaucaucaucgugaucaucgucauccugcucagccugaucgccguggggcugcugcucuacugcaaggcccgcuccacccccgugacccugagcaaggaccagcuguccggcaucaacaacaucgccuucagcaacugaggacuagucccuguucccagagcccacuuuuuuuucuuuuuuugaaauaaaauagccugucuuucagaucucaaaggcucuuuucagagccaccaaaaaaaaaaaaaaaaaaaaaaaaaaaaaaaaaaaaaaaaaaaaaaaaaaaaaaaaaaaaaaaaaaaaaaaaaaaaaaaaaaaaaaaaaaaaaaaaaaaaa

SEQ ID NO: 21466 - RNA, 1817 nt, Artificial Sequence
  mRNA product Design a-1 (hSL-A100) comprising derived and/or modified sequence from HRSV(A2)__F-del_DSCav1_mut6 (opt1)
aggagagucccgcagucggcguccagcggcucugcuuguucgugugugugucguugcaggccuuauucaagcuuaccauggagcugcucauccugaaggccaacgccaucaccaccauccugacggcggugaccuucugcuucgccagcggccagaacaucaccgaggaguucuaccaguccacgugcagcgccgucuccaagggguaccucggcgcccugcggaccggcugguacaccuccgugaucaccaucgagcugagcaacaucaaggagaacaagugcaacgggaccgacgccaaggugaagcucaucaagcaggagcuggacaaguacaagaacgcggucacggaccugcagaugcugaugugcuccaccccggcaaccggcuccggcuccgccaucgcgagcggcgucgccgugugcaaggugcugcaccucgagggggaggucaacaagaucaagagcgcccugcuguccaccaacaaggccguggugagccucuccaacggcgucagcgugcugaccuucaaggugcuggaccucaagaacuacaucgacaagcagcugcugcccauccugaacaagcagagcugcuccauccccaaccccgagacggugauggaguuccagcagaagaacaaccggcuccuggagaucacccgcgaguucagcgugaacgccggggucaccacccccguguccacguacaugcugaccaacagcgagcuccugucccugaucaacgacaugccgaucaccaacgaccagaagaagcucaugagcaacaacgugcagaucguccggcagcaguccuacagcaucaugugcaucaucaaggaggaggugcuggcguacgugguccagcugccccucuacggcgugaucgacacccccugcuggaagcugcacacgagcccccugugcaccaccaacaccaaggagggguccaacaucugccucacgcgcaccgaccggggcugguacugcgacaacgccggcagcgucuccuucuucccgcaggccgagaccugcaaggugugcagcaaccgcguguucugcgacaccaugaacucccugacgcugcccagcgagguaaaccucugcaacgucgacaucuucaaccccaaguacgacugcaagaucaugaccuccaagaccgacgugagcuccagcgugaucaccucccugggggccaucgucagcugcuacggcaagacgaagugcaccgccagcaacaagaacaaggggaucaucaagaccuucuccaacggcugcgacuacgugagcaacaagggcguggacaccguguccgucgggaacacccuguacuacgugaacaagcaggagggccagagccucuacgugaagggggagcccaucaucaacuucuacgacccgcuggucuuccccuccgacgaguucgacgcgagcaucucccaggugaacgagaagaucaaccagagccuggccuucauccgcaaguccgacgagcugcuccacaacgugaacgccggcaagagcacgaccaacaucaugaucaccaccaucaucaucgucaucaucgugauccugcugucccucaucgccguggggcugcugcucuacugcaaggcccggugaggacuagucccuguucccagagcccacuuuuuuuucuuuuuuugaaauaaaauagccugucuuucagaucucaaaggcucuuuucagagccaccaaaaaaaaaaaaaaaaaaaaaaaaaaaaaaaaaaaaaaaaaaaaaaaaaaaaaaaaaaaaaaaaaaaaaaaaaaaaaaaaaaaaaaaaaaaaaaaaaaaaa

SEQ ID NO: 21467 - RNA, 1817 nt, Artificial Sequence
  mRNA product Design a-1 (hSL-A100) comprising derived and/or modified sequence from HRSV(A2)__F-del_DSCav1_mut6 (opt1)
aggagagucccgcagucggcguccagcggcucugcuuguucgugugugugucguugcaggccuuauucaagcuuaccauggagcugcucauccugaaggccaacgccaucaccaccauccugacggcggugaccuucugcuucgccagcggccagaacaucaccgaggaguucuaccaguccacgugcagcgccgucuccaagggguaccucggcgcccugcgcaccgggugguacaccagcgugaucaccaucgagcuguccaacaucaaggagaacaagugcaacggcaccgacgccaaggugaagcucaucaagcaggagcuggacaaguacaagaacgcggucacggaccugcagaugcucaugugcagcacccccgccaccggguccggcagcgccaucgccuccggcguggcggugugcaagguccugcaccuggagggggaggugaacaagaucaagagcgcccuccuguccaccaacaaggccguggucagccuguccaacggcgugagcgugcucacguucaagguccuggaccugaagaacuacaucgacaagcagcuccugccgauccugaacaagcaguccugcagcauccccaaccccgagaccgugauggaguuccagcagaagaacaaccggcuccuggagaucacccgcgaguucuccgugaacgccggggucaccacgcccgugagcaccuacaugcugaccaacuccgagcuccugagccugaucaacgacaugccgaucaccaacgaccagaagaagcucaugagcaacaacgugcagaucguccggcagcaguccuacagcaucaugugcaucaucaaggaggaggugcuggccuacgugguccagcugccccucuacggcgugaucgacacgcccugcuggaagcugcacaccagcccccugugcaccaccaacacgaaggaggggagcaacaucugccucacccgcaccgaccggggcugguacugcgacaacgcgggcuccgugagcuucuucccgcaggccgagaccugcaaggucugcuccaaccgcguguucugcgacacgaugaacagccugacccugcccuccgaggucaaccucugcaacguggacaucuucaaccccaaguacgacugcaagaucaugaccagcaagaccgacguguccagcuccgucaucacgagccugggggccaucguguccugcuacggcaagaccaagugcaccgccagcaacaagaacaaggggaucaucaagaccuucuccaacggcugcgacuacgugagcaacaagggcgucgacacgguguccguggggaacacccuguacuacgucaacaagcaggagggccagagccucuacgugaagggggagcccaucaucaacuucuacgacccgcugguguuccccagcgacgaguucgacgccuccaucagccaggucaacgagaagaucaaccagucccuggcguucauccggaaguccgacgagcuccugcacaacgugaacgccggcaaguccaccaccaacaucaugaucaccacgaucaucaucgugaucaucgucauccugcucagccugaucgccguggggcugcuccuguacugcaaggcccgcugaggacuagucccuguucccagagcccacuuuuuuuucuuuuuuugaaauaaaauagccugucuuucagaucucaaaggcucuuuucagagccaccaaaaaaaaaaaaaaaaaaaaaaaaaaaaaaaaaaaaaaaaaaaaaaaaaaaaaaaaaaaaaaaaaaaaaaaaaaaaaaaaaaaaaaaaaaaaaaaaaaaaa

SEQ ID NO: 21468 - RNA, 1817 nt, Artificial Sequence
  mRNA product Design a-1 (hSL-A100) comprising derived and/or modified sequence from HRSV(A2)__F-del_DSCav1_mut6 (opt1)
aggagagucccgcagucggcguccagcggcucugcuuguucgugugugugucguugcaggccuuauucaagcuuaccauggagcugcucauccugaaggccaacgccaucaccaccauccugacggcggugaccuucugcuucgccagcggccagaacaucaccgaggaguucuaccaguccacgugcagcgccgucuccaagggguaccucggcgcccugcgcaccgggugguacaccagcgugaucaccaucgagcuguccaacaucaaggagaacaagugcaacggcaccgacgccaaggugaagcucaucaagcaggagcuggacaaguacaagaacgcggucacggaccugcagaugcucaugugcagcacccccgccaccggguccggcagcgccaucgccuccggcguggcggugugcaagguccugcaccuggagggggaggugaacaagaucaagagcgcccuccuguccaccaacaaggccguggucagccuguccaacggcgugagcgugcucacguucaagguccuggaccugaagaacuacaucgacaagcagcuccugccgauccugaacaagcaguccugcagcauccccaaccccgagaccgugauggaguuccagcagaagaacaaccggcuccuggagaucacccgcgaguucuccgugaacgccggggucaccacgcccgugagcaccuacaugcugaccaacuccgagcuccugagccugaucaacgacaugccgaucaccaacgaccagaagaagcucaugagcaacaacgugcagaucguccggcagcaguccuacagcaucaugugcaucaucaaggaggaggugcuggccuacgugguccagcugccccucuacggcgugaucgacacgcccugcuggaagcugcacaccagcccccugugcaccaccaacacgaaggaggggagcaacaucugccucacccgcaccgaccggggcugguacugcgacaacgcgggcuccgugagcuucuucccgcaggccgagaccugcaaggucugcuccaaccgcguguucugcgacacgaugaacagccugacccugcccuccgaggucaaccucugcaacguggacaucuucaaccccaaguacgacugcaagaucaugaccagcaagaccgacguguccagcuccgucaucacgagccugggggccaucguguccugcuacggcaagaccaagugcaccgccagcaacaagaacaaggggaucaucaagaccuucuccaacggcugcgacuacgugagcaacaagggcgucgacacgguguccguggggaacacccuguacuacgucaacaagcaggagggccagagccucuacgugaagggggagcccaucaucaacuucuacgacccgcugguguuccccagcgacgaguucgacgccuccaucagccaggucaacgagaagaucaaccagucccuggcguucauccggaaguccgacgagcuccugcacaacgugaacgccggcaaguccaccaccaacaucaugaucaccacgaucaucaucgugaucaucgucauccugcucagccugaucgccguggggcugcugcucuacugcaaggcccgcugaggacuagucccuguucccagagcccacuuuuuuuucuuuuuuugaaauaaaauagccugucuuucagaucucaaaggcucuuuucagagccaccaaaaaaaaaaaaaaaaaaaaaaaaaaaaaaaaaaaaaaaaaaaaaaaaaaaaaaaaaaaaaaaaaaaaaaaaaaaaaaaaaaaaaaaaaaaaaaaaaaaaa

SEQ ID NO: 21469 - RNA, 1880 nt, Artificial Sequence
  mRNA product Design a-1 (hSL-A100) comprising derived and/or modified sequence from HRSV(A2)__F_DSCav1_mut7 (opt1)
aggagagucccgcagucggcguccagcggcucugcuuguucgugugugugucguugcaggccuuauucaagcuuaccauggagcugcucauccugaaggccaacgccaucaccaccauccugacggcggugaccuucugcuucgccagcggccagaacaucaccgaggaguucuaccaguccacgugcagcgccgucuccaagggguaccucagcgcccugcggaccggcugguacaccuccgugaucaccaucgagcugagcaacaucaaggagaacaagugcaacgggaccgacgccaaggugaagcucaucaagcaggagcuggacaaguacaagaacgcggucacggagcugcagaugcugaugugcuccaccccggcaaccggcuccggcuccgccaucgcgagcggcgucgccgugugcaaggugcugcaccucgagggggaggucaacaagaucaagagcgcccugcuguccaccaacaaggccguggugagccucuccaacggcgucagcgugcugaccuucaaggugcuggaccucaagaacuacaucgacaagcagcugcugcccauccugaacaagcagagcugcuccaucagcaacaucgagacggugauggaguuccagcagaagaacaaccggcuccuggagaucacccgcgaguucagcgugaacgccggggucaccacccccguguccacguacaugcugaccaacagcgagcuccugucccugaucaacgacaugccgaucaccaacgaccagaagaagcucaugagcaacaacgugcagaucguccggcagcaguccuacagcaucaugugcaucaucaaggaggaggugcuggcguacgugguccagcugccccucuacggcgugaucgacacccccugcuggaagcugcacacgagcccccugugcaccaccaacaccaaggagggguccaacaucugccucacgcgcaccgaccggggcugguacugcgacaacgccggcagcgucuccuucuucccgcaggccgagaccugcaaggugugcagcaaccgcguguucugcgacaccaugaacucccugacgcugcccagcgagguaaaccucugcaacgucgacaucuucaaccccaaguacgacugcaagaucaugaccuccaagaccgacgugagcuccagcgugaucaccucccugggggccaucgucagcugcuacggcaagacgaagugcaccgccagcaacaagaacaaggggaucaucaagaccuucuccaacggcugcgacuacgugagcaacaagggcguggacaccguguccgucgggaacacccuguacuacgugaacaagcaggagggcaagagccucuacgugaagggggagcccaucaucaacuucuacgacccgcuggucuuccccuccgacgaguucgacgcgagcaucucccaggugaacgagaagaucaaccagagccuggccuucauccgcaaguccgacgagcugcuccacaacgugaacgccggcaagagcacgaccaacaucaugaucaccaccaucaucaucgucaucaucgugauccugcugucccucaucgccguggggcugcugcucuacugcaaggcccggagcacgcccgucacccuguccaaggaccagcugagcggcaucaacaacaucgcguucuccaacugaggacuagucccuguucccagagcccacuuuuuuuucuuuuuuugaaauaaaauagccugucuuucagaucucaaaggcucuuuucagagccaccaaaaaaaaaaaaaaaaaaaaaaaaaaaaaaaaaaaaaaaaaaaaaaaaaaaaaaaaaaaaaaaaaaaaaaaaaaaaaaaaaaaaaaaaaaaaaaaaaaaaa

SEQ ID NO: 21470 - RNA, 1880 nt, Artificial Sequence
  mRNA product Design a-1 (hSL-A100) comprising derived and/or modified sequence from HRSV(A2)__F_DSCav1_mut7 (opt1)
aggagagucccgcagucggcguccagcggcucugcuuguucgugugugugucguugcaggccuuauucaagcuuaccauggagcugcucauccugaaggccaacgccaucaccaccauccugacggcggugaccuucugcuucgccagcggccagaacaucaccgaggaguucuaccaguccacgugcagcgccgucuccaagggguaccucagcgcccugcgcaccggcugguacaccuccgugaucaccaucgagcugagcaacaucaaggagaacaagugcaacgggaccgacgccaaggugaagcucaucaagcaggagcuggacaaguacaagaacgcggucacggagcugcagaugcucaugugcuccacccccgccaccggcagcggguccgccaucgccagcggcguggcggugugcaagguccugcaccuggagggcgaggugaacaagaucaaguccgcccuccugagcaccaacaaggccguggucucccugagcaacgggguguccgugcucacguucaagguccuggaccugaagaacuacaucgacaagcagcuccugccgauccugaacaagcagagcugcuccaucagcaacaucgagaccgugauggaguuccagcagaagaacaaccggcuccuggagaucacccgcgaguucuccgugaacgccggcgucaccacgcccgugagcaccuacaugcugaccaacagcgagcuccugucccugaucaacgacaugcccaucaccaacgaccagaagaagcucaugagcaacaacgugcagaucguccggcagcaguccuacagcaucaugugcaucaucaaggaggaggugcuggccuacgugguccagcugccccucuacggggugaucgacacgccgugcuggaagcugcacaccagcccccugugcaccaccaacacgaaggagggcagcaacaucugccucacccgcaccgaccgggggugguacugcgacaacgcgggcuccgugagcuucuucccccaggccgagaccugcaaggucugcuccaaccgcguguucugcgacacgaugaacagccugacccugcccuccgaggucaaccucugcaacguggacaucuucaacccgaaguacgacugcaagaucaugaccagcaagaccgacguguccagcuccgucaucacgagccugggcgccaucguguccugcuacgggaagaccaagugcaccgccagcaacaagaacaagggcaucaucaagaccuucuccaacgggugcgacuacgugagcaacaagggcgucgacacggugagcgugggcaacacccuguacuacgucaacaagcaggaggggaagucccucuacgugaagggcgagcccaucaucaacuucuacgacccccugguguuccccagcgacgaguucgacgccuccaucagccaggucaacgagaagaucaaccagucccuggcguucauccggaaguccgacgagcuccugcacaacgugaacgccgggaaguccaccaccaacaucaugaucaccacgaucaucaucgugaucaucgucauccugcucagccugaucgccgugggccugcuccuguacugcaaggcccgcuccaccccggugacccugagcaaggaccagcuguccgggaucaacaacaucgccuucagcaacugaggacuagucccuguucccagagcccacuuuuuuuucuuuuuuugaaauaaaauagccugucuuucagaucucaaaggcucuuuucagagccaccaaaaaaaaaaaaaaaaaaaaaaaaaaaaaaaaaaaaaaaaaaaaaaaaaaaaaaaaaaaaaaaaaaaaaaaaaaaaaaaaaaaaaaaaaaaaaaaaaaaaa

SEQ ID NO: 21471 - RNA, 1880 nt, Artificial Sequence
  mRNA product Design a-1 (hSL-A100) comprising derived and/or modified sequence from HRSV(A2)__F_DSCav1_mut7 (opt1)
aggagagucccgcagucggcguccagcggcucugcuuguucgugugugugucguugcaggccuuauucaagcuuaccauggagcugcucauccugaaggccaacgccaucaccaccauccugacggcggugaccuucugcuucgccagcggccagaacaucaccgaggaguucuaccaguccacgugcagcgccgucuccaagggguaccucagcgcccugcgcaccggcugguacaccuccgugaucaccaucgagcugagcaacaucaaggagaacaagugcaacgggaccgacgccaaggugaagcucaucaagcaggagcuggacaaguacaagaacgcggucacggagcugcagaugcucaugugcuccacccccgccaccggcagcggguccgccaucgccagcggcguggcggugugcaagguccugcaccuggagggcgaggugaacaagaucaaguccgcccuccugagcaccaacaaggccguggucucccugagcaacgggguguccgugcucacguucaagguccuggaccugaagaacuacaucgacaagcagcuccugccgauccugaacaagcagagcugcuccaucagcaacaucgagaccgugauggaguuccagcagaagaacaaccggcuccuggagaucacccgcgaguucuccgugaacgccggcgucaccacgcccgugagcaccuacaugcugaccaacagcgagcuccugucccugaucaacgacaugcccaucaccaacgaccagaagaagcucaugagcaacaacgugcagaucguccggcagcaguccuacagcaucaugugcaucaucaaggaggaggugcuggccuacgugguccagcugccccucuacggggugaucgacacgccgugcuggaagcugcacaccagcccccugugcaccaccaacacgaaggagggcagcaacaucugccucacccgcaccgaccgggggugguacugcgacaacgcgggcuccgugagcuucuucccccaggccgagaccugcaaggucugcuccaaccgcguguucugcgacacgaugaacagccugacccugcccuccgaggucaaccucugcaacguggacaucuucaacccgaaguacgacugcaagaucaugaccagcaagaccgacguguccagcuccgucaucacgagccugggcgccaucguguccugcuacgggaagaccaagugcaccgccagcaacaagaacaagggcaucaucaagaccuucuccaacgggugcgacuacgugagcaacaagggcgucgacacggugagcgugggcaacacccuguacuacgucaacaagcaggaggggaagucccucuacgugaagggcgagcccaucaucaacuucuacgacccccugguguuccccagcgacgaguucgacgccuccaucagccaggucaacgagaagaucaaccagucccuggcguucauccggaaguccgacgagcuccugcacaacgugaacgccgggaaguccaccaccaacaucaugaucaccacgaucaucaucgugaucaucgucauccugcucagccugaucgccgugggccugcugcucuacugcaaggcccgcuccaccccggugacccugagcaaggaccagcuguccgggaucaacaacaucgccuucagcaacugaggacuagucccuguucccagagcccacuuuuuuuucuuuuuuugaaauaaaauagccugucuuucagaucucaaaggcucuuuucagagccaccaaaaaaaaaaaaaaaaaaaaaaaaaaaaaaaaaaaaaaaaaaaaaaaaaaaaaaaaaaaaaaaaaaaaaaaaaaaaaaaaaaaaaaaaaaaaaaaaaaaaa

SEQ ID NO: 21472 - RNA, 1817 nt, Artificial Sequence
  mRNA product Design a-1 (hSL-A100) comprising derived and/or modified sequence from HRSV(A2)__F-del_DSCav1_mut7 (opt1)
aggagagucccgcagucggcguccagcggcucugcuuguucgugugugugucguugcaggccuuauucaagcuuaccauggagcugcucauccugaaggccaacgccaucaccaccauccugacggcggugaccuucugcuucgccagcggccagaacaucaccgaggaguucuaccaguccacgugcagcgccgucuccaagggguaccucagcgcccugcggaccggcugguacaccuccgugaucaccaucgagcugagcaacaucaaggagaacaagugcaacgggaccgacgccaaggugaagcucaucaagcaggagcuggacaaguacaagaacgcggucacggagcugcagaugcugaugugcuccaccccggcaaccggcuccggcuccgccaucgcgagcggcgucgccgugugcaaggugcugcaccucgagggggaggucaacaagaucaagagcgcccugcuguccaccaacaaggccguggugagccucuccaacggcgucagcgugcugaccuucaaggugcuggaccucaagaacuacaucgacaagcagcugcugcccauccugaacaagcagagcugcuccaucagcaacaucgagacggugauggaguuccagcagaagaacaaccggcuccuggagaucacccgcgaguucagcgugaacgccggggucaccacccccguguccacguacaugcugaccaacagcgagcuccugucccugaucaacgacaugccgaucaccaacgaccagaagaagcucaugagcaacaacgugcagaucguccggcagcaguccuacagcaucaugugcaucaucaaggaggaggugcuggcguacgugguccagcugccccucuacggcgugaucgacacccccugcuggaagcugcacacgagcccccugugcaccaccaacaccaaggagggguccaacaucugccucacgcgcaccgaccggggcugguacugcgacaacgccggcagcgucuccuucuucccgcaggccgagaccugcaaggugugcagcaaccgcguguucugcgacaccaugaacucccugacgcugcccagcgagguaaaccucugcaacgucgacaucuucaaccccaaguacgacugcaagaucaugaccuccaagaccgacgugagcuccagcgugaucaccucccugggggccaucgucagcugcuacggcaagacgaagugcaccgccagcaacaagaacaaggggaucaucaagaccuucuccaacggcugcgacuacgugagcaacaagggcguggacaccguguccgucgggaacacccuguacuacgugaacaagcaggagggcaagagccucuacgugaagggggagcccaucaucaacuucuacgacccgcuggucuuccccuccgacgaguucgacgcgagcaucucccaggugaacgagaagaucaaccagagccuggccuucauccgcaaguccgacgagcugcuccacaacgugaacgccggcaagagcacgaccaacaucaugaucaccaccaucaucaucgucaucaucgugauccugcugucccucaucgccguggggcugcugcucuacugcaaggcccggugaggacuagucccuguucccagagcccacuuuuuuuucuuuuuuugaaauaaaauagccugucuuucagaucucaaaggcucuuuucagagccaccaaaaaaaaaaaaaaaaaaaaaaaaaaaaaaaaaaaaaaaaaaaaaaaaaaaaaaaaaaaaaaaaaaaaaaaaaaaaaaaaaaaaaaaaaaaaaaaaaaaaa

SEQ ID NO: 21473 - RNA, 1817 nt, Artificial Sequence
  mRNA product Design a-1 (hSL-A100) comprising derived and/or modified sequence from HRSV(A2)__F-del_DSCav1_mut7 (opt1)
aggagagucccgcagucggcguccagcggcucugcuuguucgugugugugucguugcaggccuuauucaagcuuaccauggagcugcucauccugaaggccaacgccaucaccaccauccugacggcggugaccuucugcuucgccagcggccagaacaucaccgaggaguucuaccaguccacgugcagcgccgucuccaagggguaccucagcgcccugcgcaccggcugguacaccuccgugaucaccaucgagcugagcaacaucaaggagaacaagugcaacgggaccgacgccaaggugaagcucaucaagcaggagcuggacaaguacaagaacgcggucacggagcugcagaugcucaugugcuccacccccgccaccggcagcggguccgccaucgccagcggcguggcggugugcaagguccugcaccuggagggcgaggugaacaagaucaaguccgcccuccugagcaccaacaaggccguggucucccugagcaacgggguguccgugcucacguucaagguccuggaccugaagaacuacaucgacaagcagcuccugccgauccugaacaagcagagcugcuccaucagcaacaucgagaccgugauggaguuccagcagaagaacaaccggcuccuggagaucacccgcgaguucuccgugaacgccggcgucaccacgcccgugagcaccuacaugcugaccaacagcgagcuccugucccugaucaacgacaugcccaucaccaacgaccagaagaagcucaugagcaacaacgugcagaucguccggcagcaguccuacagcaucaugugcaucaucaaggaggaggugcuggccuacgugguccagcugccccucuacggggugaucgacacgccgugcuggaagcugcacaccagcccccugugcaccaccaacacgaaggagggcagcaacaucugccucacccgcaccgaccgggggugguacugcgacaacgcgggcuccgugagcuucuucccccaggccgagaccugcaaggucugcuccaaccgcguguucugcgacacgaugaacagccugacccugcccuccgaggucaaccucugcaacguggacaucuucaacccgaaguacgacugcaagaucaugaccagcaagaccgacguguccagcuccgucaucacgagccugggcgccaucguguccugcuacgggaagaccaagugcaccgccagcaacaagaacaagggcaucaucaagaccuucuccaacgggugcgacuacgugagcaacaagggcgucgacacggugagcgugggcaacacccuguacuacgucaacaagcaggaggggaagucccucuacgugaagggcgagcccaucaucaacuucuacgacccccugguguuccccagcgacgaguucgacgccuccaucagccaggucaacgagaagaucaaccagucccuggcguucauccggaaguccgacgagcuccugcacaacgugaacgccgggaaguccaccaccaacaucaugaucaccacgaucaucaucgugaucaucgucauccugcucagccugaucgccgugggccugcuccuguacugcaaggcccgcugaggacuagucccuguucccagagcccacuuuuuuuucuuuuuuugaaauaaaauagccugucuuucagaucucaaaggcucuuuucagagccaccaaaaaaaaaaaaaaaaaaaaaaaaaaaaaaaaaaaaaaaaaaaaaaaaaaaaaaaaaaaaaaaaaaaaaaaaaaaaaaaaaaaaaaaaaaaaaaaaaaaaa

SEQ ID NO: 21474 - RNA, 1817 nt, Artificial Sequence
  mRNA product Design a-1 (hSL-A100) comprising derived and/or modified sequence from HRSV(A2)__F-del_DSCav1_mut7 (opt1)
aggagagucccgcagucggcguccagcggcucugcuuguucgugugugugucguugcaggccuuauucaagcuuaccauggagcugcucauccugaaggccaacgccaucaccaccauccugacggcggugaccuucugcuucgccagcggccagaacaucaccgaggaguucuaccaguccacgugcagcgccgucuccaagggguaccucagcgcccugcgcaccggcugguacaccuccgugaucaccaucgagcugagcaacaucaaggagaacaagugcaacgggaccgacgccaaggugaagcucaucaagcaggagcuggacaaguacaagaacgcggucacggagcugcagaugcucaugugcuccacccccgccaccggcagcggguccgccaucgccagcggcguggcggugugcaagguccugcaccuggagggcgaggugaacaagaucaaguccgcccuccugagcaccaacaaggccguggucucccugagcaacgggguguccgugcucacguucaagguccuggaccugaagaacuacaucgacaagcagcuccugccgauccugaacaagcagagcugcuccaucagcaacaucgagaccgugauggaguuccagcagaagaacaaccggcuccuggagaucacccgcgaguucuccgugaacgccggcgucaccacgcccgugagcaccuacaugcugaccaacagcgagcuccugucccugaucaacgacaugcccaucaccaacgaccagaagaagcucaugagcaacaacgugcagaucguccggcagcaguccuacagcaucaugugcaucaucaaggaggaggugcuggccuacgugguccagcugccccucuacggggugaucgacacgccgugcuggaagcugcacaccagcccccugugcaccaccaacacgaaggagggcagcaacaucugccucacccgcaccgaccgggggugguacugcgacaacgcgggcuccgugagcuucuucccccaggccgagaccugcaaggucugcuccaaccgcguguucugcgacacgaugaacagccugacccugcccuccgaggucaaccucugcaacguggacaucuucaacccgaaguacgacugcaagaucaugaccagcaagaccgacguguccagcuccgucaucacgagccugggcgccaucguguccugcuacgggaagaccaagugcaccgccagcaacaagaacaagggcaucaucaagaccuucuccaacgggugcgacuacgugagcaacaagggcgucgacacggugagcgugggcaacacccuguacuacgucaacaagcaggaggggaagucccucuacgugaagggcgagcccaucaucaacuucuacgacccccugguguuccccagcgacgaguucgacgccuccaucagccaggucaacgagaagaucaaccagucccuggcguucauccggaaguccgacgagcuccugcacaacgugaacgccgggaaguccaccaccaacaucaugaucaccacgaucaucaucgugaucaucgucauccugcucagccugaucgccgugggccugcugcucuacugcaaggcccgcugaggacuagucccuguucccagagcccacuuuuuuuucuuuuuuugaaauaaaauagccugucuuucagaucucaaaggcucuuuucagagccaccaaaaaaaaaaaaaaaaaaaaaaaaaaaaaaaaaaaaaaaaaaaaaaaaaaaaaaaaaaaaaaaaaaaaaaaaaaaaaaaaaaaaaaaaaaaaaaaaaaaaa

SEQ ID NO: 21475 - RNA, 1883 nt, Artificial Sequence
  mRNA product Design a-1 (hSL-A100) comprising derived and/or modified sequence from HRSV(A2)__F_DSCav1_mut8 (opt1)
aggagagucccgcagucggcguccagcggcucugcuuguucgugugugugucguugcaggccuuauucaagcuuaccauggagcugcucauccugaaggccaacgccaucaccaccauccugacggcggugaccuucugcuucgccagcggccagaacaucaccgaggaguucuaccaguccacgugcagcgccgucuccaagggguaccucggcgcccugcggaccggcugguacaccuccgugaucaccaucgagcugagcaacaucaaggagaucaagugcaacgggaccgacgccaaggugaagcucaucaagcaggagcuggacaaguacaagaacgcggucacggaccugcagcuccugaugcaguccaccccggcaaccggcuccggcuccgccaucgcgagcggcgucgccgugugcaaggugcugcaccucgagggggaggucaacaagaucaagagcgcccugcuguccaccaacaaggccguggugagccucuccggcugcggcgucagcgugcugaccuucaaggugcuggaccucaagaacuacaucgacaagcagcugcugcccauccugaacaagcagagcugcuccauccccaacaucgagacggugaucgaguuccagcagaagaacaaccggcuccuggagaucacccgcgaguucagcgugaacgccggggucaccacccccguguccacguacaugcugaccaacagcgagcuccugucccugaucaacgacaugccgaucaccaacgaccagaagaagcucaugagcaacaacgugcagaucguccggcagcaguccuacagcaucaugugcaucaucaaggaggaggugcuggcguacgugguccagcugccccucuacggcgugaucgacacccccugcuggaagcugcacacgagcccccugugcaccaccaacaccaaggagggguccaacaucugccucacgcgcaccgaccggggcugguacugcgacaacgccggcagcgucuccuucuucccgcaggccgagaccugcaaggugcagagcaaccgcguguucugcgacaccaugaacucccugacgcugcccagcgagguaaaccucugcaacgucgacaucuucaaccccaaguacgacugcaagaucaugaccuccaagaccgacgugagcuccagcgugaucaccucccugggggccaucgucagcugcuacggcaagacgaagugcaccgccagcaacaagugccgggggaucaucaagaccuucuccaacggcugcgacuacgugagcaacaagggcguggacaccguguccgucgggaacacccuguacuacgugaacaagcaggagggccagagccucuacgugaagggggagcccaucaucaacuucuacgacccgcuggucuuccccuccgacgaguucgacgcgagcaucucccaggugaacgagaagaucaaccagagccuggccuucauccgcaaguccgacgagcugcuccacaacgugaacgccggcaagagcacgaccaacaucaugaucaccaccaucaucaucgucaucaucgugauccugcugucccucaucgccguggggcugcugcucuacugcaaggcccggagcacgcccgucacccuguccaaggaccagcugagcggcaucaacaacaucgcguucuccaacugaggacuagucccuguucccagagcccacuuuuuuuucuuuuuuugaaauaaaauagccugucuuucagaucucaaaggcucuuuucagagccaccaaaaaaaaaaaaaaaaaaaaaaaaaaaaaaaaaaaaaaaaaaaaaaaaaaaaaaaaaaaaaaaaaaaaaaaaaaaaaaaaaaaaaaaaaaaaaaaaaaaaa

SEQ ID NO: 21476 - RNA, 1883 nt, Artificial Sequence
  mRNA product Design a-1 (hSL-A100) comprising derived and/or modified sequence from HRSV(A2)__F_DSCav1_mut8 (opt1)
aggagagucccgcagucggcguccagcggcucugcuuguucgugugugugucguugcaggccuuauucaagcuuaccauggagcugcucauccugaaggccaacgccaucaccaccauccugacggcggugaccuucugcuucgccagcggccagaacaucaccgaggaguucuaccaguccacgugcagcgccgucuccaagggguaccucggcgcccugcgcaccgggugguacaccagcgugaucaccaucgagcuguccaacaucaaggagaucaagugcaacggcaccgacgccaaggugaagcucaucaagcaggagcuggacaaguacaagaacgcggucacggaccugcagcuccugaugcagagcacccccgccaccggguccggcagcgccaucgccuccggcguggcggugugcaagguccugcaccucgagggggaggugaacaagaucaagagcgcccugcuguccaccaacaaggccguggucagccucuccggcugcggggugagcgugcugacguucaagguccuggaccucaagaacuacaucgacaagcagcugcugccgauccucaacaagcaguccugcagcauccccaacaucgagaccgugaucgaguuccagcagaagaacaaccggcugcuggagaucacccgcgaguucuccgugaacgccggcgucaccacgcccgugagcaccuacaugcucaccaacuccgagcugcugagccucaucaacgacaugcccaucaccaacgaccagaagaagcugaugagcaacaacgugcagaucguccggcagcaguccuacagcaucaugugcaucaucaaggaggaggugcuggccuacgugguccagcucccgcuguacggggugaucgacacgcccugcuggaagcugcacaccagcccccucugcaccaccaacacgaaggagggcuccaacaucugccugacccgcaccgaccggggcugguacugcgacaacgcgggguccgugagcuucuucccccaggccgagaccugcaagguccaguccaaccgcguguucugcgacacgaugaacagccugacccucccguccgaggucaaccugugcaacguggacaucuucaaccccaaguacgacugcaagaucaugaccagcaagaccgacguguccagcuccgucaucacgagccugggcgccaucguguccugcuacgggaagaccaagugcaccgccagcaacaagugccggggcaucaucaagaccuucuccaacggcugcgacuacgugagcaacaagggggucgacacgguguccgugggcaacacccucuacuacgucaacaagcaggaggggcagagccuguacgugaagggcgagcccaucaucaacuucuacgacccccugguguucccgagcgacgaguucgacgccuccaucagccaggucaacgagaagaucaaccagucccucgcguucauccgcaagagcgacgagcugcugcacaacgugaacgccgggaaguccaccaccaacaucaugaucaccacgaucaucaucgugaucaucgucauccuccugagccugaucgccgugggccuccugcuguacugcaaggcccgguccacccccgugacccugagcaaggaccagcucuccggcaucaacaacaucgccuucagcaacugaggacuagucccuguucccagagcccacuuuuuuuucuuuuuuugaaauaaaauagccugucuuucagaucucaaaggcucuuuucagagccaccaaaaaaaaaaaaaaaaaaaaaaaaaaaaaaaaaaaaaaaaaaaaaaaaaaaaaaaaaaaaaaaaaaaaaaaaaaaaaaaaaaaaaaaaaaaaaaaaaaaaa

SEQ ID NO: 21477 - RNA, 1883 nt, Artificial Sequence
  mRNA product Design a-1 (hSL-A100) comprising derived and/or modified sequence from HRSV(A2)__F_DSCav1_mut8 (opt1)
aggagagucccgcagucggcguccagcggcucugcuuguucgugugugugucguugcaggccuuauucaagcuuaccauggagcugcucauccugaaggccaacgccaucaccaccauccugacggcggugaccuucugcuucgccagcggccagaacaucaccgaggaguucuaccaguccacgugcagcgccgucuccaagggguaccucggcgcccugcgcaccgggugguacaccagcgugaucaccaucgagcuguccaacaucaaggagaucaagugcaacggcaccgacgccaaggugaagcucaucaagcaggagcuggacaaguacaagaacgcggucacggaccugcagcuccugaugcagagcacccccgccaccggguccggcagcgccaucgccuccggcguggcggugugcaagguccugcaccucgagggggaggugaacaagaucaagagcgcccugcuguccaccaacaaggccguggucagccucuccggcugcggggugagcgugcugacguucaagguccuggaccucaagaacuacaucgacaagcagcugcugccgauccucaacaagcaguccugcagcauccccaacaucgagaccgugaucgaguuccagcagaagaacaaccggcugcuggagaucacccgcgaguucuccgugaacgccggcgucaccacgcccgugagcaccuacaugcucaccaacuccgagcugcugagccucaucaacgacaugcccaucaccaacgaccagaagaagcugaugagcaacaacgugcagaucguccggcagcaguccuacagcaucaugugcaucaucaaggaggaggugcuggccuacgugguccagcucccgcuguacggggugaucgacacgcccugcuggaagcugcacaccagcccccucugcaccaccaacacgaaggagggcuccaacaucugccugacccgcaccgaccggggcugguacugcgacaacgcgggguccgugagcuucuucccccaggccgagaccugcaagguccaguccaaccgcguguucugcgacacgaugaacagccugacccucccguccgaggucaaccugugcaacguggacaucuucaaccccaaguacgacugcaagaucaugaccagcaagaccgacguguccagcuccgucaucacgagccugggcgccaucguguccugcuacgggaagaccaagugcaccgccagcaacaagugccggggcaucaucaagaccuucuccaacggcugcgacuacgugagcaacaagggggucgacacgguguccgugggcaacacccucuacuacgucaacaagcaggaggggcagagccuguacgugaagggcgagcccaucaucaacuucuacgacccccugguguucccgagcgacgaguucgacgccuccaucagccaggucaacgagaagaucaaccagucccucgcguucauccgcaagagcgacgagcugcugcacaacgugaacgccgggaaguccaccaccaacaucaugaucaccacgaucaucaucgugaucaucgucauccuccugagccugaucgccgugggccugcuccuguacugcaaggcccgguccacccccgugacccugagcaaggaccagcucuccggcaucaacaacaucgccuucagcaacugaggacuagucccuguucccagagcccacuuuuuuuucuuuuuuugaaauaaaauagccugucuuucagaucucaaaggcucuuuucagagccaccaaaaaaaaaaaaaaaaaaaaaaaaaaaaaaaaaaaaaaaaaaaaaaaaaaaaaaaaaaaaaaaaaaaaaaaaaaaaaaaaaaaaaaaaaaaaaaaaaaaaa

SEQ ID NO: 21478 - RNA, 1820 nt, Artificial Sequence
  mRNA product Design a-1 (hSL-A100) comprising derived and/or modified sequence from HRSV(A2)__F-del_DSCav1_mut8 (opt1)
aggagagucccgcagucggcguccagcggcucugcuuguucgugugugugucguugcaggccuuauucaagcuuaccauggagcugcucauccugaaggccaacgccaucaccaccauccugacggcggugaccuucugcuucgccagcggccagaacaucaccgaggaguucuaccaguccacgugcagcgccgucuccaagggguaccucggcgcccugcggaccggcugguacaccuccgugaucaccaucgagcugagcaacaucaaggagaucaagugcaacgggaccgacgccaaggugaagcucaucaagcaggagcuggacaaguacaagaacgcggucacggaccugcagcuccugaugcaguccaccccggcaaccggcuccggcuccgccaucgcgagcggcgucgccgugugcaaggugcugcaccucgagggggaggucaacaagaucaagagcgcccugcuguccaccaacaaggccguggugagccucuccggcugcggcgucagcgugcugaccuucaaggugcuggaccucaagaacuacaucgacaagcagcugcugcccauccugaacaagcagagcugcuccauccccaacaucgagacggugaucgaguuccagcagaagaacaaccggcuccuggagaucacccgcgaguucagcgugaacgccggggucaccacccccguguccacguacaugcugaccaacagcgagcuccugucccugaucaacgacaugccgaucaccaacgaccagaagaagcucaugagcaacaacgugcagaucguccggcagcaguccuacagcaucaugugcaucaucaaggaggaggugcuggcguacgugguccagcugccccucuacggcgugaucgacacccccugcuggaagcugcacacgagcccccugugcaccaccaacaccaaggagggguccaacaucugccucacgcgcaccgaccggggcugguacugcgacaacgccggcagcgucuccuucuucccgcaggccgagaccugcaaggugcagagcaaccgcguguucugcgacaccaugaacucccugacgcugcccagcgagguaaaccucugcaacgucgacaucuucaaccccaaguacgacugcaagaucaugaccuccaagaccgacgugagcuccagcgugaucaccucccugggggccaucgucagcugcuacggcaagacgaagugcaccgccagcaacaagugccgggggaucaucaagaccuucuccaacggcugcgacuacgugagcaacaagggcguggacaccguguccgucgggaacacccuguacuacgugaacaagcaggagggccagagccucuacgugaagggggagcccaucaucaacuucuacgacccgcuggucuuccccuccgacgaguucgacgcgagcaucucccaggugaacgagaagaucaaccagagccuggccuucauccgcaaguccgacgagcugcuccacaacgugaacgccggcaagagcacgaccaacaucaugaucaccaccaucaucaucgucaucaucgugauccugcugucccucaucgccguggggcugcugcucuacugcaaggcccggugaggacuagucccuguucccagagcccacuuuuuuuucuuuuuuugaaauaaaauagccugucuuucagaucucaaaggcucuuuucagagccaccaaaaaaaaaaaaaaaaaaaaaaaaaaaaaaaaaaaaaaaaaaaaaaaaaaaaaaaaaaaaaaaaaaaaaaaaaaaaaaaaaaaaaaaaaaaaaaaaaaaaa

SEQ ID NO: 21479 - RNA, 1820 nt, Artificial Sequence
  mRNA product Design a-1 (hSL-A100) comprising derived and/or modified sequence from HRSV(A2)__F-del_DSCav1_mut8 (opt1)
aggagagucccgcagucggcguccagcggcucugcuuguucgugugugugucguugcaggccuuauucaagcuuaccauggagcugcucauccugaaggccaacgccaucaccaccauccugacggcggugaccuucugcuucgccagcggccagaacaucaccgaggaguucuaccaguccacgugcagcgccgucuccaagggguaccucggcgcccugcgcaccgggugguacaccagcgugaucaccaucgagcuguccaacaucaaggagaucaagugcaacggcaccgacgccaaggugaagcucaucaagcaggagcuggacaaguacaagaacgcggucacggaccugcagcuccugaugcagagcacccccgccaccggguccggcagcgccaucgccuccggcguggcggugugcaagguccugcaccucgagggggaggugaacaagaucaagagcgcccugcuguccaccaacaaggccguggucagccucuccggcugcggggugagcgugcugacguucaagguccuggaccucaagaacuacaucgacaagcagcugcugccgauccucaacaagcaguccugcagcauccccaacaucgagaccgugaucgaguuccagcagaagaacaaccggcugcuggagaucacccgcgaguucuccgugaacgccggcgucaccacgcccgugagcaccuacaugcucaccaacuccgagcugcugagccucaucaacgacaugcccaucaccaacgaccagaagaagcugaugagcaacaacgugcagaucguccggcagcaguccuacagcaucaugugcaucaucaaggaggaggugcuggccuacgugguccagcucccgcuguacggggugaucgacacgcccugcuggaagcugcacaccagcccccucugcaccaccaacacgaaggagggcuccaacaucugccugacccgcaccgaccggggcugguacugcgacaacgcgggguccgugagcuucuucccccaggccgagaccugcaagguccaguccaaccgcguguucugcgacacgaugaacagccugacccucccguccgaggucaaccugugcaacguggacaucuucaaccccaaguacgacugcaagaucaugaccagcaagaccgacguguccagcuccgucaucacgagccugggcgccaucguguccugcuacgggaagaccaagugcaccgccagcaacaagugccggggcaucaucaagaccuucuccaacggcugcgacuacgugagcaacaagggggucgacacgguguccgugggcaacacccucuacuacgucaacaagcaggaggggcagagccuguacgugaagggcgagcccaucaucaacuucuacgacccccugguguucccgagcgacgaguucgacgccuccaucagccaggucaacgagaagaucaaccagucccucgcguucauccgcaagagcgacgagcugcugcacaacgugaacgccgggaaguccaccaccaacaucaugaucaccacgaucaucaucgugaucaucgucauccuccugagccugaucgccgugggccuccugcuguacugcaaggcccggugaggacuagucccuguucccagagcccacuuuuuuuucuuuuuuugaaauaaaauagccugucuuucagaucucaaaggcucuuuucagagccaccaaaaaaaaaaaaaaaaaaaaaaaaaaaaaaaaaaaaaaaaaaaaaaaaaaaaaaaaaaaaaaaaaaaaaaaaaaaaaaaaaaaaaaaaaaaaaaaaaaaaa

SEQ ID NO: 21480 - RNA, 1820 nt, Artificial Sequence
  mRNA product Design a-1 (hSL-A100) comprising derived and/or modified sequence from HRSV(A2)__F-del_DSCav1_mut8 (opt1)
aggagagucccgcagucggcguccagcggcucugcuuguucgugugugugucguugcaggccuuauucaagcuuaccauggagcugcucauccugaaggccaacgccaucaccaccauccugacggcggugaccuucugcuucgccagcggccagaacaucaccgaggaguucuaccaguccacgugcagcgccgucuccaagggguaccucggcgcccugcgcaccgggugguacaccagcgugaucaccaucgagcuguccaacaucaaggagaucaagugcaacggcaccgacgccaaggugaagcucaucaagcaggagcuggacaaguacaagaacgcggucacggaccugcagcuccugaugcagagcacccccgccaccggguccggcagcgccaucgccuccggcguggcggugugcaagguccugcaccucgagggggaggugaacaagaucaagagcgcccugcuguccaccaacaaggccguggucagccucuccggcugcggggugagcgugcugacguucaagguccuggaccucaagaacuacaucgacaagcagcugcugccgauccucaacaagcaguccugcagcauccccaacaucgagaccgugaucgaguuccagcagaagaacaaccggcugcuggagaucacccgcgaguucuccgugaacgccggcgucaccacgcccgugagcaccuacaugcucaccaacuccgagcugcugagccucaucaacgacaugcccaucaccaacgaccagaagaagcugaugagcaacaacgugcagaucguccggcagcaguccuacagcaucaugugcaucaucaaggaggaggugcuggccuacgugguccagcucccgcuguacggggugaucgacacgcccugcuggaagcugcacaccagcccccucugcaccaccaacacgaaggagggcuccaacaucugccugacccgcaccgaccggggcugguacugcgacaacgcgggguccgugagcuucuucccccaggccgagaccugcaagguccaguccaaccgcguguucugcgacacgaugaacagccugacccucccguccgaggucaaccugugcaacguggacaucuucaaccccaaguacgacugcaagaucaugaccagcaagaccgacguguccagcuccgucaucacgagccugggcgccaucguguccugcuacgggaagaccaagugcaccgccagcaacaagugccggggcaucaucaagaccuucuccaacggcugcgacuacgugagcaacaagggggucgacacgguguccgugggcaacacccucuacuacgucaacaagcaggaggggcagagccuguacgugaagggcgagcccaucaucaacuucuacgacccccugguguucccgagcgacgaguucgacgccuccaucagccaggucaacgagaagaucaaccagucccucgcguucauccgcaagagcgacgagcugcugcacaacgugaacgccgggaaguccaccaccaacaucaugaucaccacgaucaucaucgugaucaucgucauccuccugagccugaucgccgugggccugcuccuguacugcaaggcccggugaggacuagucccuguucccagagcccacuuuuuuuucuuuuuuugaaauaaaauagccugucuuucagaucucaaaggcucuuuucagagccaccaaaaaaaaaaaaaaaaaaaaaaaaaaaaaaaaaaaaaaaaaaaaaaaaaaaaaaaaaaaaaaaaaaaaaaaaaaaaaaaaaaaaaaaaaaaaaaaaaaaaa

SEQ ID NO: 21481 - RNA, 1043 nt, Artificial Sequence
  mRNA product Design a-1 (hSL-A100) comprising derived and/or modified sequence from HRSV(A2)__P0DOE7.1__M (opt1)
aggagagucccgcagucggcguccagcggcucugcuuguucgugugugugucguugcaggccuuauucaagcuuaccauggagaccuacgugaacaagcugcacgagggcagcaccuacacggccgccguccaguacaacgugcucgagaaggacgacgaccccgcgucccugaccaucugggugccgauguuccagagcuccaugcccgccgaccugcucaucaaggagcuggccaacgucaacauccuggugaagcagaucagcacccccaaggggcccucccuccgcgugaugaucaacagccgguccgccguccuggcccagaugccgagcaaguucaccaucugcgcgaacgugucccuggacgagcgcagcaagcucgccuacgacgugacgacccccugcgagaucaaggccugcucccugaccugccucaagagcaagaacaugcugaccacggucaaggaccugaccaugaagacccugaaccccacccacgacaucaucgcccucugcgaguucgagaacaucgugacguccaagaaggugaucauccccaccuaccugcggagcaucuccguccgcaacaaggaccugaacacccucgagaacaucaccacgaccgaguucaagaacgcgaucaccaacgccaagaucaucccguacagcggccugcugcucgugaucaccgugacggacaacaagggggccuucaaguacaucaagccccagucccaguucaucgucgaccugggcgccuaccuggagaaggagagcaucuacuacgugaccaccaacuggaagcacaccgccacgcgguucgcgaucaagcccauggaggacugaggacuagucccuguucccagagcccacuuuuuuuucuuuuuuugaaauaaaauagccugucuuucagaucucaaaggcucuuuucagagccaccaaaaaaaaaaaaaaaaaaaaaaaaaaaaaaaaaaaaaaaaaaaaaaaaaaaaaaaaaaaaaaaaaaaaaaaaaaaaaaaaaaaaaaaaaaaaaaaaaaaaa

SEQ ID NO: 21482 - RNA, 1043 nt, Artificial Sequence; identical to SEQ ID NO: 21481
  mRNA product Design a-1 (hSL-A100) comprising derived and/or modified sequence from HRSV(A2)__P0DOE7.1__M (opt1)

SEQ ID NO: 21483 - RNA, 1448 nt, Artificial Sequence
  mRNA product Design a-1 (hSL-A100) comprising derived and/or modified sequence from HRSV(A2)__P03418.1__N (opt1)
aggagagucccgcagucggcguccagcggcucugcuuguucgugugugugucguugcaggccuuauucaagcuuaccauggcccugagcaaggugaagcucaacgacacccugaacaaggaccagcugcucuccagcuccaaguacaccauccagcgcagcaccggcgacuccaucgacacccccaacuacgacguccagaagcacaucaacaagcugugcgggaugcugcucaucaccgaggacgccaaccacaaguucaccggccugaucgggaugcuguacgcgaugagccggcucggccgcgaggacacgaucaagauccugcgggacgccggguaccacgugaaggccaacggcguggacgucaccacccaccgccaggacaucaacggcaaggagaugaaguucgaggugcugacccucgccucccugacgaccgagauccagaucaacaucgagaucgagagccggaaguccuacaagaagaugcugaaggagaugggggagguggccccggaguaccgccacgacagccccgacugcggcaugaucauccucugcaucgcggcccuggucaucaccaagcuggccgccggggaccgguccggccucaccgcggugauccgccgggccaacaacgugcugaagaacgagaugaagcgcuacaaggggcugcuccccaaggacaucgccaacagcuucuacgaggucuucgagaagcacccccacuucaucgacguguucgugcacuucggcaucgcccaguccagcacgcggggcgggucccgcgucgagggcaucuucgccgggcuguucaugaacgcguacggcgccggccaggugaugcugcgguggggcgugcucgccaagagcgucaagaacaucaugcuggggcacgccuccgugcaggccgagauggagcaggucguggagguguacgaguacgcgcagaagcucgggggcgaggccggguucuaccacauccugaacaacccgaaggccagccugcugucccucacccaguucccccacuucagcagcgugguccugggcaacgccgccggccuggggaucaugggcgaguaccgcgggacgccccggaaccaggaccucuacgacgcggccaaggccuacgccgagcagcugaaggagaacggcgugaucaacuacuccgugcuggaccucaccgccgaggagcuggaggcgaucaagcaccagcugaaccccaaggacaacgacgucgagcucugaggacuagucccuguucccagagcccacuuuuuuuucuuuuuuugaaauaaaauagccugucuuucagaucucaaaggcucuuuucagagccaccaaaaaaaaaaaaaaaaaaaaaaaaaaaaaaaaaaaaaaaaaaaaaaaaaaaaaaaaaaaaaaaaaaaaaaaaaaaaaaaaaaaaaaaaaaaaaaaaaaaaa

SEQ ID NO: 21484 - RNA, 1448 nt, Artificial Sequence; identical to SEQ ID NO: 21483
  mRNA product Design a-1 (hSL-A100) comprising derived and/or modified sequence from HRSV(A2)__P03418.1__N (opt1)

SEQ ID NO: 21485 - RNA, 998 nt, Artificial Sequence
  mRNA product Design a-1 (hSL-A100) comprising derived and/or modified sequence from HRSV(A2)__P03421.1__P (opt1)
aggagagucccgcagucggcguccagcggcucugcuuguucgugugugugucguugcaggccuuauucaagcuuaccauggagaaguucgcccccgaguuccacggcgaggacgccaacaaccgcgcgaccaaguuccuggagagcaucaaggggaaguucaccuccccgaaggaccccaagaagaaggacagcaucaucuccgugaacagcaucgacaucgaggucacgaaggagucccccaucaccagcaacuccaccaucaucaaccccaccaacgagacggacgacaccgccggcaacaagccgaacuaccagcggaagccccucgugagcuucaaggaggaccccacccccuccgacaacccguucagcaagcuguacaaggagaccaucgagacguucgacaacaacgaggaggaguccagcuacuccuacgaggagaucaacgaccagaccaacgacaacaucaccgcccgccuggaccggaucgacgagaagcucagcgagauccuggggaugcugcacacccucguggucgccuccgccggccccacgagcgcgcgcgacgggauccgggacgccaugaucggccugcgcgaggagaugaucgagaagauccggaccgaggcccugaugaccaacgaccgccucgaggccauggcgcggcugcgcaacgaggaguccgagaagauggccaaggacaccagcgacgaggugucccugaaccccacgagcgagaagcucaacaaccugcuggagggcaacgacagcgacaacgaccucucccuggaggacuucugaggacuagucccuguucccagagcccacuuuuuuuucuuuuuuugaaauaaaauagccugucuuucagaucucaaaggcucuuuucagagccaccaaaaaaaaaaaaaaaaaaaaaaaaaaaaaaaaaaaaaaaaaaaaaaaaaaaaaaaaaaaaaaaaaaaaaaaaaaaaaaaaaaaaaaaaaaaaaaaaaaaaa

SEQ ID NO: 21486 - RNA, 998 nt, Artificial Sequence; identical to SEQ ID NO: 21485
  mRNA product Design a-1 (hSL-A100) comprising derived and/or modified sequence from HRSV(A2)__P03421.1__P (opt1)

SEQ ID NO: 21487 - RNA, 857 nt, Artificial Sequence
  mRNA product Design a-1 (hSL-A100) comprising derived and/or modified sequence from HRSV(A2)__P04545.1__M2-1 (opt1)
aggagagucccgcagucggcguccagcggcucugcuuguucgugugugugucguugcaggccuuauucaagcuuaccaugagccgccggaaccccugcaaguucgagauccgcggccacugccugaacgggaagcggugccacuucucccacaacuacuucgaguggccgccccacgcccuccuggugcgccagaacuucaugcugaaccggauccucaagagcauggacaaguccaucgacacccugagcgagaucuccggcgccgcggagcuggaccgcaccgaggaguacgcccucggggucgugggcgugcuggagagcuacaucggguccaucaacaacaucacgaagcagagcgccugcgucgccauguccaagcugcucaccgagcugaacagcgacgacaucaagaagcugcgggacaacgaggagcucaacucccccaagauccgcguguacaacaccgugaucagcuacaucgaguccaaccggaagaacaacaagcagaccauccaccuccugaagcgccugcccgccgacguccugaagaagacgaucaagaacacccuggacauccacaagagcaucaccaucaacaacccgaaggaguccaccgugagcgacacgaacgaccacgcgaagaacaacgacaccaccugaggacuagucccuguucccagagcccacuuuuuuuucuuuuuuugaaauaaaauagccugucuuucagaucucaaaggcucuuuucagagccaccaaaaaaaaaaaaaaaaaaaaaaaaaaaaaaaaaaaaaaaaaaaaaaaaaaaaaaaaaaaaaaaaaaaaaaaaaaaaaaaaaaaaaaaaaaaaaaaaaaaaa

SEQ ID NO: 21488 - RNA, 857 nt, Artificial Sequence; identical to SEQ ID NO: 21487
  mRNA product Design a-1 (hSL-A100) comprising derived and/or modified sequence from HRSV(A2)__P04545.1__M2-1 (opt1)

SEQ ID NO: 21489 - RNA, 1997 nt, Artificial Sequence
  mRNA product Design a-1 (hSL-A100) comprising derived and/or modified sequence from HRSV(Memphis-37)__AIY60640.1__F0 (opt1)
aggagagucccgcagucggcguccagcggcucugcuuguucgugugugugucguugcaggccuuauucaagcuuaccauggagcugcccauccucaagaccaacgccaucaccacgauccuggccgcggugacccugugcuucgccagcucccagaacaucaccgaggaguucuaccagagcacgugcuccgccgucagcaagggcuaccucuccgcccugcgcaccgggugguacaccagcgugaucaccaucgagcuguccaacaucaaggagaacaagugcaacggcaccgacgccaaggugaagcucaucaagcaggagcuggacaaguacaagaacgcggucacggagcugcagcuccugaugcagagcaccccggccgccaacaaccgggcccgccgggagcugccccgcuucaugaacuacacccucaacaacaccaagaacaacaacgugacgcuguccaagaagcggaagcgccgguuccugggguuccuccugggcguggggagcgcgaucgccuccggcaucgccgucagcaaggugcugcaccucgagggcgaggugaacaagaucaagaacgcccugcuguccaccaacaaggccgucgugagccucuccaacggggugagcguccugaccuccaaggugcuggaccucaagaacuacaucgacaagcagcugcugcccaucgugaacaagcagagcugcuccaucagcaacaucgagaccgucaucgaguuccagcagaagaacaaccgccuccuggagaucacgcgggaguucagcgugaacgcgggcgugaccacccccgucuccaccuacaugcugacgaacagcgagcuccugucccugaucaacgacaugccgaucaccaacgaccagaagaagcucaugagcaacaacgugcagaucgugcgccagcaguccuacagcaucauguccaucaucaaggaggagguccuggccuacguggugcagcugccccucuacggggucaucgacacccccugcuggaagcugcacaccagcccccugugcacgaccaacaccaaggagggcuccaacaucugccucacccggacggaccgcgggugguacugcgacaacgccggcagcguguccuucuucccgcaggccgagaccugcaagguccagagcaaccggguguucugcgacaccaugaacucccugacccugcccagcgaggugaaccucugcaacaucgacaucuucaaccccaaguacgacugcaagaucaugacguccaagaccgacgucagcuccagcgugaucaccucccugggcgccaucgugagcugcuacgggaagaccaagugcacggcgagcaacaagaaccgcggcaucaucaagaccuucuccaacgggugcgacuacgucagcaacaagggcguggacaccguguccgucggcaacacccuguacuacgugaacaagcaggagggcaagagccucuacgugaagggggagcccaucaucaacuucuacgacccgcuggucuuccccuccgacgaguucgacgccagcaucucccaggugaacgagaagaucaaccagagccuggccuucauccggaaguccgacgagcuccugcacaacgugaacgucggcaagagcaccacgaacaucaugaucaccaccaucaucaucgugaucaucgugauccugcugcuccugaucgccgucgggcuguuccucuacugcaaggcccgcuccacccccgugacgcugagcaaggaccagcuguccgggaucaacaacaucgcguucagcaacugaggacuagucccuguucccagagcccacuuuuuuuucuuuuuuugaaauaaaauagccugucuuucagaucucaaaggcucuuuucagagccaccaaaaaaaaaaaaaaaaaaaaaaaaaaaaaaaaaaaaaaaaaaaaaaaaaaaaaaaaaaaaaaaaaaaaaaaaaaaaaaaaaaaaaaaaaaaaaaaaaaaaa

SEQ ID NO: 21490 - RNA, 1997 nt, Artificial Sequence
  mRNA product Design a-1 (hSL-A100) comprising derived and/or modified sequence from HRSV(Memphis-37)__AIY60640.1__F0 (opt1)
aggagagucccgcagucggcguccagcggcucugcuuguucgugugugugucguugcaggccuuauucaagcuuaccauggagcugcccauccucaagaccaacgccaucaccacgauccuggccgcggugacccugugcuucgccagcucccagaacaucaccgaggaguucuaccagagcacgugcuccgccgucagcaagggcuaccucuccgcccugcgcaccgggugguacaccagcgugaucaccaucgagcuguccaacaucaaggagaacaagugcaacggcaccgacgccaaggugaagcucaucaagcaggagcuggacaaguacaagaacgcggucacggagcugcagcuccugaugcagagcaccccggccgccaacaaccgggcccgccgggagcugccccgcuucaugaacuacacccucaacaacaccaagaacaacaacgugacgcuguccaagaagcggaagcgccgguuccugggguuccuccugggcguggggagcgcgaucgccuccggcaucgccgucagcaaggugcugcaccucgagggcgaggugaacaagaucaagaacgcccugcuguccaccaacaaggccgucgugagccucuccaacggggugagcguccugaccuccaaggugcuggaccucaagaacuacaucgacaagcagcugcugcccaucgugaacaagcagagcugcuccaucagcaacaucgagaccgucaucgaguuccagcagaagaacaaccgccuccuggagaucacgcgggaguucagcgugaacgcgggcgugaccacccccgucuccaccuacaugcugacgaacagcgagcuccugucccugaucaacgacaugccgaucaccaacgaccagaagaagcucaugagcaacaacgugcagaucgugcgccagcaguccuacagcaucauguccaucaucaaggaggagguccuggccuacguggugcagcugccccucuacggggucaucgacacccccugcuggaagcugcacaccagcccccugugcacgaccaacaccaaggagggcuccaacaucugccucacccggacggaccgcgggugguacugcgacaacgccggcagcguguccuucuucccgcaggccgagaccugcaagguccagagcaaccggguguucugcgacaccaugaacucccugacccugcccagcgaggugaaccucugcaacaucgacaucuucaaccccaaguacgacugcaagaucaugacguccaagaccgacgucagcuccagcgugaucaccucccugggcgccaucgugagcugcuacgggaagaccaagugcacggcgagcaacaagaaccgcggcaucaucaagaccuucuccaacgggugcgacuacgucagcaacaagggcguggacaccguguccgucggcaacacccuguacuacgugaacaagcaggagggcaagagccucuacgugaagggggagcccaucaucaacuucuacgacccgcuggucuuccccuccgacgaguucgacgccagcaucucccaggugaacgagaagaucaaccagagccuggccuucauccggaaguccgacgagcugcuccacaacgugaacgucggcaagagcaccacgaacaucaugaucaccaccaucaucaucgugaucaucgugauccugcugcuccugaucgccgucgggcuguuccucuacugcaaggcccgcuccacccccgugacgcugagcaaggaccagcuguccgggaucaacaacaucgcguucagcaacugaggacuagucccuguucccagagcccacuuuuuuuucuuuuuuugaaauaaaauagccugucuuucagaucucaaaggcucuuuucagagccaccaaaaaaaaaaaaaaaaaaaaaaaaaaaaaaaaaaaaaaaaaaaaaaaaaaaaaaaaaaaaaaaaaaaaaaaaaaaaaaaaaaaaaaaaaaaaaaaaaaaaa

SEQ ID NO: 21491 - RNA, 1934 nt, Artificial Sequence
  mRNA product Design a-1 (hSL-A100) comprising derived and/or modified sequence from HRSV(Memphis-37)__AIY60640.1__F-del (opt1)
aggagagucccgcagucggcguccagcggcucugcuuguucgugugugugucguugcaggccuuauucaagcuuaccauggagcugcccauccucaagaccaacgccaucaccacgauccuggccgcggugacccugugcuucgccagcucccagaacaucaccgaggaguucuaccagagcacgugcuccgccgucagcaagggcuaccucuccgcccugcgcaccgggugguacaccagcgugaucaccaucgagcuguccaacaucaaggagaacaagugcaacggcaccgacgccaaggugaagcucaucaagcaggagcuggacaaguacaagaacgcggucacggagcugcagcuccugaugcagagcaccccggccgccaacaaccgggcccgccgggagcugccccgcuucaugaacuacacccucaacaacaccaagaacaacaacgugacgcuguccaagaagcggaagcgccgguuccugggguuccuccugggcguggggagcgcgaucgccuccggcaucgccgucagcaaggugcugcaccucgagggcgaggugaacaagaucaagaacgcccugcuguccaccaacaaggccgucgugagccucuccaacggggugagcguccugaccuccaaggugcuggaccucaagaacuacaucgacaagcagcugcugcccaucgugaacaagcagagcugcuccaucagcaacaucgagaccgucaucgaguuccagcagaagaacaaccgccuccuggagaucacgcgggaguucagcgugaacgcgggcgugaccacccccgucuccaccuacaugcugacgaacagcgagcuccugucccugaucaacgacaugccgaucaccaacgaccagaagaagcucaugagcaacaacgugcagaucgugcgccagcaguccuacagcaucauguccaucaucaaggaggagguccuggccuacguggugcagcugccccucuacggggucaucgacacccccugcuggaagcugcacaccagcccccugugcacgaccaacaccaaggagggcuccaacaucugccucacccggacggaccgcgggugguacugcgacaacgccggcagcguguccuucuucccgcaggccgagaccugcaagguccagagcaaccggguguucugcgacaccaugaacucccugacccugcccagcgaggugaaccucugcaacaucgacaucuucaaccccaaguacgacugcaagaucaugacguccaagaccgacgucagcuccagcgugaucaccucccugggcgccaucgugagcugcuacgggaagaccaagugcacggcgagcaacaagaaccgcggcaucaucaagaccuucuccaacgggugcgacuacgucagcaacaagggcguggacaccguguccgucggcaacacccuguacuacgugaacaagcaggagggcaagagccucuacgugaagggggagcccaucaucaacuucuacgacccgcuggucuuccccuccgacgaguucgacgccagcaucucccaggugaacgagaagaucaaccagagccuggccuucauccggaaguccgacgagcuccugcacaacgugaacgucggcaagagcaccacgaacaucaugaucaccaccaucaucaucgugaucaucgugauccugcugcuccugaucgccgucgggcuguuccucuacugcaaggcccgcugaggacuagucccuguucccagagcccacuuuuuuuucuuuuuuugaaauaaaauagccugucuuucagaucucaaaggcucuuuucagagccaccaaaaaaaaaaaaaaaaaaaaaaaaaaaaaaaaaaaaaaaaaaaaaaaaaaaaaaaaaaaaaaaaaaaaaaaaaaaaaaaaaaaaaaaaaaaaaaaaaaaaa

SEQ ID NO: 21492 - RNA, 1934 nt, Artificial Sequence
  mRNA product Design a-1 (hSL-A100) comprising derived and/or modified sequence from HRSV(Memphis-37)__AIY60640.1__F-del (opt1)
aggagagucccgcagucggcguccagcggcucugcuuguucgugugugugucguugcaggccuuauucaagcuuaccauggagcugcccauccucaagaccaacgccaucaccacgauccuggccgcggugacccugugcuucgccagcucccagaacaucaccgaggaguucuaccagagcacgugcuccgccgucagcaagggcuaccucuccgcccugcgcaccgggugguacaccagcgugaucaccaucgagcuguccaacaucaaggagaacaagugcaacggcaccgacgccaaggugaagcucaucaagcaggagcuggacaaguacaagaacgcggucacggagcugcagcuccugaugcagagcaccccggccgccaacaaccgggcccgccgggagcugccccgcuucaugaacuacacccucaacaacaccaagaacaacaacgugacgcuguccaagaagcggaagcgccgguuccugggguuccuccugggcguggggagcgcgaucgccuccggcaucgccgucagcaaggugcugcaccucgagggcgaggugaacaagaucaagaacgcccugcuguccaccaacaaggccgucgugagccucuccaacggggugagcguccugaccuccaaggugcuggaccucaagaacuacaucgacaagcagcugcugcccaucgugaacaagcagagcugcuccaucagcaacaucgagaccgucaucgaguuccagcagaagaacaaccgccuccuggagaucacgcgggaguucagcgugaacgcgggcgugaccacccccgucuccaccuacaugcugacgaacagcgagcuccugucccugaucaacgacaugccgaucaccaacgaccagaagaagcucaugagcaacaacgugcagaucgugcgccagcaguccuacagcaucauguccaucaucaaggaggagguccuggccuacguggugcagcugccccucuacggggucaucgacacccccugcuggaagcugcacaccagcccccugugcacgaccaacaccaaggagggcuccaacaucugccucacccggacggaccgcgggugguacugcgacaacgccggcagcguguccuucuucccgcaggccgagaccugcaagguccagagcaaccggguguucugcgacaccaugaacucccugacccugcccagcgaggugaaccucugcaacaucgacaucuucaaccccaaguacgacugcaagaucaugacguccaagaccgacgucagcuccagcgugaucaccucccugggcgccaucgugagcugcuacgggaagaccaagugcacggcgagcaacaagaaccgcggcaucaucaagaccuucuccaacgggugcgacuacgucagcaacaagggcguggacaccguguccgucggcaacacccuguacuacgugaacaagcaggagggcaagagccucuacgugaagggggagcccaucaucaacuucuacgacccgcuggucuuccccuccgacgaguucgacgccagcaucucccaggugaacgagaagaucaaccagagccuggccuucauccggaaguccgacgagcugcuccacaacgugaacgucggcaagagcaccacgaacaucaugaucaccaccaucaucaucgugaucaucgugauccugcugcuccugaucgccgucgggcuguuccucuacugcaaggcccgcugaggacuagucccuguucccagagcccacuuuuuuuucuuuuuuugaaauaaaauagccugucuuucagaucucaaaggcucuuuucagagccaccaaaaaaaaaaaaaaaaaaaaaaaaaaaaaaaaaaaaaaaaaaaaaaaaaaaaaaaaaaaaaaaaaaaaaaaaaaaaaaaaaaaaaaaaaaaaaaaaaaaaa

SEQ ID NO: 21493 - RNA, 1997 nt, Artificial Sequence
  mRNA product Design a-1 (hSL-A100) comprising derived and/or modified sequence from HRSV(Memphis-37)__AIY60640.1__F0_DSCav1 (opt1)
aggagagucccgcagucggcguccagcggcucugcuuguucgugugugugucguugcaggccuuauucaagcuuaccauggagcugcccauccucaagaccaacgccaucaccacgauccuggccgcggugacccugugcuucgccagcucccagaacaucaccgaggaguucuaccagagcacgugcuccgccgucagcaagggcuaccucuccgcccugcgcaccgggugguacaccagcgugaucaccaucgagcuguccaacaucaaggagaacaagugcaacggcaccgacgccaaggugaagcucaucaagcaggagcuggacaaguacaagaacgcggucacggagcugcagcuccugaugcagagcaccccggccgccaacaaccgggcccgccgggagcugccccgcuucaugaacuacacccucaacaacaccaagaacaacaacgugacgcuguccaagaagcggaagcgccgguuccugggguuccuccugggcguggggagcgcgaucgccuccggcaucgccgucugcaaggugcugcaccucgagggcgaggugaacaagaucaagaacgcccugcuguccaccaacaaggccgucgugagccucuccaacggggugagcguccugaccuucaaggugcuggaccucaagaacuacaucgacaagcagcugcugcccauccugaacaagcagagcugcuccaucagcaacaucgagaccgucaucgaguuccagcagaagaacaaccgccuccuggagaucacgcgggaguucagcgugaacgcgggcgugaccacccccgucuccaccuacaugcugacgaacagcgagcuccugucccugaucaacgacaugccgaucaccaacgaccagaagaagcucaugagcaacaacgugcagaucgugcgccagcaguccuacagcaucaugugcaucaucaaggaggagguccuggccuacguggugcagcugccccucuacggggucaucgacacccccugcuggaagcugcacaccagcccccugugcacgaccaacaccaaggagggcuccaacaucugccucacccggacggaccgcgggugguacugcgacaacgccggcagcguguccuucuucccgcaggccgagaccugcaagguccagagcaaccggguguucugcgacaccaugaacucccugacccugcccagcgaggugaaccucugcaacaucgacaucuucaaccccaaguacgacugcaagaucaugacguccaagaccgacgucagcuccagcgugaucaccucccugggcgccaucgugagcugcuacgggaagaccaagugcacggcgagcaacaagaaccgcggcaucaucaagaccuucuccaacgggugcgacuacgucagcaacaagggcguggacaccguguccgucggcaacacccuguacuacgugaacaagcaggagggcaagagccucuacgugaagggggagcccaucaucaacuucuacgacccgcuggucuuccccuccgacgaguucgacgccagcaucucccaggugaacgagaagaucaaccagagccuggccuucauccggaaguccgacgagcuccugcacaacgugaacgucggcaagagcaccacgaacaucaugaucaccaccaucaucaucgugaucaucgugauccugcugcuccugaucgccgucgggcuguuccucuacugcaaggcccgcuccacccccgugacgcugagcaaggaccagcuguccgggaucaacaacaucgcguucagcaacugaggacuagucccuguucccagagcccacuuuuuuuucuuuuuuugaaauaaaauagccugucuuucagaucucaaaggcucuuuucagagccaccaaaaaaaaaaaaaaaaaaaaaaaaaaaaaaaaaaaaaaaaaaaaaaaaaaaaaaaaaaaaaaaaaaaaaaaaaaaaaaaaaaaaaaaaaaaaaaaaaaaaa

SEQ ID NO: 21494 - RNA, 1997 nt, Artificial Sequence
  mRNA product Design a-1 (hSL-A100) comprising derived and/or modified sequence from HRSV(Memphis-37)__AIY60640.1__F0_DSCav1 (opt1)
aggagagucccgcagucggcguccagcggcucugcuuguucgugugugugucguugcaggccuuauucaagcuuaccauggagcugcccauccucaagaccaacgccaucaccacgauccuggccgcggugacccugugcuucgccagcucccagaacaucaccgaggaguucuaccagagcacgugcuccgccgucagcaagggcuaccucuccgcccugcgcaccgggugguacaccagcgugaucaccaucgagcuguccaacaucaaggagaacaagugcaacggcaccgacgccaaggugaagcucaucaagcaggagcuggacaaguacaagaacgcggucacggagcugcagcuccugaugcagagcaccccggccgccaacaaccgggcccgccgggagcugccccgcuucaugaacuacacccucaacaacaccaagaacaacaacgugacgcuguccaagaagcggaagcgccgguuccugggguuccuccugggcguggggagcgcgaucgccuccggcaucgccgucugcaaggugcugcaccucgagggcgaggugaacaagaucaagaacgcccugcugagcaccaacaaggccgucgugucccucagcaacgggguguccguccugaccuucaaggugcuggaccucaagaacuacaucgacaagcagcugcugcccauccucaacaagcagagcugcuccaucagcaacaucgagaccgugaucgaguuccagcagaagaacaaccgccugcuggagaucacgcgggaguucuccgucaacgcgggcgugaccacccccgugagcaccuacaugcucacgaacagcgagcugcugucccucaucaacgacaugccgaucaccaacgaccagaagaagcugaugagcaacaacguccagaucgugcgccagcaguccuacagcaucaugugcaucaucaaggaggaggugcuggccuacgucgugcagcucccccuguacggggugaucgacacccccugcuggaagcugcacaccagcccccucugcacgaccaacaccaaggagggcagcaacaucugccugacccggacggaccgcgggugguacugcgacaacgccggcuccgucagcuucuucccgcaggccgagaccugcaaggugcaguccaaccgggucuucugcgacaccaugaacagccugacccuccccuccgaggugaaccugugcaacaucgacaucuucaaccccaaguacgacugcaagaucaugacgagcaagaccgacguguccagcuccgucaucaccagccugggcgccaucguguccugcuacgggaagaccaagugcacggcgagcaacaagaaccgcggcaucaucaagaccuucuccaacgggugcgacuacgugagcaacaagggcgucgacaccgugagcgugggcaacacccucuacuacgucaacaagcaggaggggaagucccuguacgugaagggcgagcccaucaucaacuucuacgacccgcugguguuccccagcgacgaguucgacgccuccaucagccaggucaacgagaagaucaaccagucccucgccuucauccggaaguccgacgagcugcugcacaacgugaacguggggaaguccaccacgaacaucaugaucaccaccaucaucaucgucaucaucgugauccugcuccugcugaucgccgugggccucuuccuguacugcaaggcccgcagcacccccgucacgcuguccaaggaccagcucagcgggaucaacaacaucgcguucuccaacugaggacuagucccuguucccagagcccacuuuuuuuucuuuuuuugaaauaaaauagccugucuuucagaucucaaaggcucuuuucagagccaccaaaaaaaaaaaaaaaaaaaaaaaaaaaaaaaaaaaaaaaaaaaaaaaaaaaaaaaaaaaaaaaaaaaaaaaaaaaaaaaaaaaaaaaaaaaaaaaaaaaaa

SEQ ID NO: 21495 - RNA, 1997 nt, Artificial Sequence
  mRNA product Design a-1 (hSL-A100) comprising derived and/or modified sequence from HRSV(Memphis-37)__AIY60640.1__F0_DSCav1 (opt1)
aggagagucccgcagucggcguccagcggcucugcuuguucgugugugugucguugcaggccuuauucaagcuuaccauggagcugcccauccucaagaccaacgccaucaccacgauccuggccgcggugacccugugcuucgccagcucccagaacaucaccgaggaguucuaccagagcacgugcuccgccgucagcaagggcuaccucuccgcccugcgcaccgggugguacaccagcgugaucaccaucgagcuguccaacaucaaggagaacaagugcaacggcaccgacgccaaggugaagcucaucaagcaggagcuggacaaguacaagaacgcggucacggagcugcagcuccugaugcagagcaccccggccgccaacaaccgggcccgccgggagcugccccgcuucaugaacuacacccucaacaacaccaagaacaacaacgugacgcuguccaagaagcggaagcgccgguuccugggguuccuccugggcguggggagcgcgaucgccuccggcaucgccgucugcaaggugcugcaccucgagggcgaggugaacaagaucaagaacgcccugcugagcaccaacaaggccgucgugucccucagcaacgggguguccguccugaccuucaaggugcuggaccucaagaacuacaucgacaagcagcugcugcccauccucaacaagcagagcugcuccaucagcaacaucgagaccgugaucgaguuccagcagaagaacaaccgccugcuggagaucacgcgggaguucuccgucaacgcgggcgugaccacccccgugagcaccuacaugcucacgaacagcgagcugcugucccucaucaacgacaugccgaucaccaacgaccagaagaagcugaugagcaacaacguccagaucgugcgccagcaguccuacagcaucaugugcaucaucaaggaggaggugcuggccuacgucgugcagcucccccuguacggggugaucgacacccccugcuggaagcugcacaccagcccccucugcacgaccaacaccaaggagggcagcaacaucugccugacccggacggaccgcgggugguacugcgacaacgccggcuccgucagcuucuucccgcaggccgagaccugcaaggugcaguccaaccgggucuucugcgacaccaugaacagccugacccuccccuccgaggugaaccugugcaacaucgacaucuucaaccccaaguacgacugcaagaucaugacgagcaagaccgacguguccagcuccgucaucaccagccugggcgccaucguguccugcuacgggaagaccaagugcacggcgagcaacaagaaccgcggcaucaucaagaccuucuccaacgggugcgacuacgugagcaacaagggcgucgacaccgugagcgugggcaacacccucuacuacgucaacaagcaggaggggaagucccuguacgugaagggcgagcccaucaucaacuucuacgacccgcugguguuccccagcgacgaguucgacgccuccaucagccaggucaacgagaagaucaaccagucccuggccuucauccggaaguccgacgagcuccugcacaacgugaacguggggaaguccaccacgaacaucaugaucaccaccaucaucaucgucaucaucgugauccugcuccugcugaucgccgugggccucuuccuguacugcaaggcccgcagcacccccgucacgcuguccaaggaccagcucagcgggaucaacaacaucgcguucuccaacugaggacuagucccuguucccagagcccacuuuuuuuucuuuuuuugaaauaaaauagccugucuuucagaucucaaaggcucuuuucagagccaccaaaaaaaaaaaaaaaaaaaaaaaaaaaaaaaaaaaaaaaaaaaaaaaaaaaaaaaaaaaaaaaaaaaaaaaaaaaaaaaaaaaaaaaaaaaaaaaaaaaaa

SEQ ID NO: 21496 - RNA, 1934 nt, Artificial Sequence
  mRNA product Design a-1 (hSL-A100) comprising derived and/or modified sequence from HRSV(Memphis-37)__AIY60640.1__F-del_DSCav1 (opt1)
aggagagucccgcagucggcguccagcggcucugcuuguucgugugugugucguugcaggccuuauucaagcuuaccauggagcugcccauccucaagaccaacgccaucaccacgauccuggccgcggugacccugugcuucgccagcucccagaacaucaccgaggaguucuaccagagcacgugcuccgccgucagcaagggcuaccucuccgcccugcgcaccgggugguacaccagcgugaucaccaucgagcuguccaacaucaaggagaacaagugcaacggcaccgacgccaaggugaagcucaucaagcaggagcuggacaaguacaagaacgcggucacggagcugcagcuccugaugcagagcaccccggccgccaacaaccgggcccgccgggagcugccccgcuucaugaacuacacccucaacaacaccaagaacaacaacgugacgcuguccaagaagcggaagcgccgguuccugggguuccuccugggcguggggagcgcgaucgccuccggcaucgccgucugcaaggugcugcaccucgagggcgaggugaacaagaucaagaacgcccugcuguccaccaacaaggccgucgugagccucuccaacggggugagcguccugaccuucaaggugcuggaccucaagaacuacaucgacaagcagcugcugcccauccugaacaagcagagcugcuccaucagcaacaucgagaccgucaucgaguuccagcagaagaacaaccgccuccuggagaucacgcgggaguucagcgugaacgcgggcgugaccacccccgucuccaccuacaugcugacgaacagcgagcuccugucccugaucaacgacaugccgaucaccaacgaccagaagaagcucaugagcaacaacgugcagaucgugcgccagcaguccuacagcaucaugugcaucaucaaggaggagguccuggccuacguggugcagcugccccucuacggggucaucgacacccccugcuggaagcugcacaccagcccccugugcacgaccaacaccaaggagggcuccaacaucugccucacccggacggaccgcgggugguacugcgacaacgccggcagcguguccuucuucccgcaggccgagaccugcaagguccagagcaaccggguguucugcgacaccaugaacucccugacccugcccagcgaggugaaccucugcaacaucgacaucuucaaccccaaguacgacugcaagaucaugacguccaagaccgacgucagcuccagcgugaucaccucccugggcgccaucgugagcugcuacgggaagaccaagugcacggcgagcaacaagaaccgcggcaucaucaagaccuucuccaacgggugcgacuacgucagcaacaagggcguggacaccguguccgucggcaacacccuguacuacgugaacaagcaggagggcaagagccucuacgugaagggggagcccaucaucaacuucuacgacccgcuggucuuccccuccgacgaguucgacgccagcaucucccaggugaacgagaagaucaaccagagccuggccuucauccggaaguccgacgagcuccugcacaacgugaacgucggcaagagcaccacgaacaucaugaucaccaccaucaucaucgugaucaucgugauccugcugcuccugaucgccgucgggcuguuccucuacugcaaggcccgcugaggacuagucccuguucccagagcccacuuuuuuuucuuuuuuugaaauaaaauagccugucuuucagaucucaaaggcucuuuucagagccaccaaaaaaaaaaaaaaaaaaaaaaaaaaaaaaaaaaaaaaaaaaaaaaaaaaaaaaaaaaaaaaaaaaaaaaaaaaaaaaaaaaaaaaaaaaaaaaaaaaaaa

SEQ ID NO: 21497 - RNA, 1934 nt, Artificial Sequence
  mRNA product Design a-1 (hSL-A100) comprising derived and/or modified sequence from HRSV(Memphis-37)__AIY60640.1__F-del_DSCav1 (opt1)
aggagagucccgcagucggcguccagcggcucugcuuguucgugugugugucguugcaggccuuauucaagcuuaccauggagcugcccauccucaagaccaacgccaucaccacgauccuggccgcggugacccugugcuucgccagcucccagaacaucaccgaggaguucuaccagagcacgugcuccgccgucagcaagggcuaccucuccgcccugcgcaccgggugguacaccagcgugaucaccaucgagcuguccaacaucaaggagaacaagugcaacggcaccgacgccaaggugaagcucaucaagcaggagcuggacaaguacaagaacgcggucacggagcugcagcuccugaugcagagcaccccggccgccaacaaccgggcccgccgggagcugccccgcuucaugaacuacacccucaacaacaccaagaacaacaacgugacgcuguccaagaagcggaagcgccgguuccugggguuccuccugggcguggggagcgcgaucgccuccggcaucgccgucugcaaggugcugcaccucgagggcgaggugaacaagaucaagaacgcccugcugagcaccaacaaggccgucgugucccucagcaacgggguguccguccugaccuucaaggugcuggaccucaagaacuacaucgacaagcagcugcugcccauccucaacaagcagagcugcuccaucagcaacaucgagaccgugaucgaguuccagcagaagaacaaccgccugcuggagaucacgcgggaguucuccgucaacgcgggcgugaccacccccgugagcaccuacaugcucacgaacagcgagcugcugucccucaucaacgacaugccgaucaccaacgaccagaagaagcugaugagcaacaacguccagaucgugcgccagcaguccuacagcaucaugugcaucaucaaggaggaggugcuggccuacgucgugcagcucccccuguacggggugaucgacacccccugcuggaagcugcacaccagcccccucugcacgaccaacaccaaggagggcagcaacaucugccugacccggacggaccgcgggugguacugcgacaacgccggcuccgucagcuucuucccgcaggccgagaccugcaaggugcaguccaaccgggucuucugcgacaccaugaacagccugacccuccccuccgaggugaaccugugcaacaucgacaucuucaaccccaaguacgacugcaagaucaugacgagcaagaccgacguguccagcuccgucaucaccagccugggcgccaucguguccugcuacgggaagaccaagugcacggcgagcaacaagaaccgcggcaucaucaagaccuucuccaacgggugcgacuacgugagcaacaagggcgucgacaccgugagcgugggcaacacccucuacuacgucaacaagcaggaggggaagucccuguacgugaagggcgagcccaucaucaacuucuacgacccgcugguguuccccagcgacgaguucgacgccuccaucagccaggucaacgagaagaucaaccagucccucgccuucauccggaaguccgacgagcugcugcacaacgugaacguggggaaguccaccacgaacaucaugaucaccaccaucaucaucgucaucaucgugauccugcuccugcugaucgccgugggccucuuccuguacugcaaggcccgcugaggacuagucccuguucccagagcccacuuuuuuuucuuuuuuugaaauaaaauagccugucuuucagaucucaaaggcucuuuucagagccaccaaaaaaaaaaaaaaaaaaaaaaaaaaaaaaaaaaaaaaaaaaaaaaaaaaaaaaaaaaaaaaaaaaaaaaaaaaaaaaaaaaaaaaaaaaaaaaaaaaaaa

SEQ ID NO: 21498 - RNA, 1934 nt, Artificial Sequence
  mRNA product Design a-1 (hSL-A100) comprising derived and/or modified sequence from HRSV(Memphis-37)__AIY60640.1__F-del_DSCav1 (opt1)
aggagagucccgcagucggcguccagcggcucugcuuguucgugugugugucguugcaggccuuauucaagcuuaccauggagcugcccauccucaagaccaacgccaucaccacgauccuggccgcggugacccugugcuucgccagcucccagaacaucaccgaggaguucuaccagagcacgugcuccgccgucagcaagggcuaccucuccgcccugcgcaccgggugguacaccagcgugaucaccaucgagcuguccaacaucaaggagaacaagugcaacggcaccgacgccaaggugaagcucaucaagcaggagcuggacaaguacaagaacgcggucacggagcugcagcuccugaugcagagcaccccggccgccaacaaccgggcccgccgggagcugccccgcuucaugaacuacacccucaacaacaccaagaacaacaacgugacgcuguccaagaagcggaagcgccgguuccugggguuccuccugggcguggggagcgcgaucgccuccggcaucgccgucugcaaggugcugcaccucgagggcgaggugaacaagaucaagaacgcccugcugagcaccaacaaggccgucgugucccucagcaacgggguguccguccugaccuucaaggugcuggaccucaagaacuacaucgacaagcagcugcugcccauccucaacaagcagagcugcuccaucagcaacaucgagaccgugaucgaguuccagcagaagaacaaccgccugcuggagaucacgcgggaguucuccgucaacgcgggcgugaccacccccgugagcaccuacaugcucacgaacagcgagcugcugucccucaucaacgacaugccgaucaccaacgaccagaagaagcugaugagcaacaacguccagaucgugcgccagcaguccuacagcaucaugugcaucaucaaggaggaggugcuggccuacgucgugcagcucccccuguacggggugaucgacacccccugcuggaagcugcacaccagcccccucugcacgaccaacaccaaggagggcagcaacaucugccugacccggacggaccgcgggugguacugcgacaacgccggcuccgucagcuucuucccgcaggccgagaccugcaaggugcaguccaaccgggucuucugcgacaccaugaacagccugacccuccccuccgaggugaaccugugcaacaucgacaucuucaaccccaaguacgacugcaagaucaugacgagcaagaccgacguguccagcuccgucaucaccagccugggcgccaucguguccugcuacgggaagaccaagugcacggcgagcaacaagaaccgcggcaucaucaagaccuucuccaacgggugcgacuacgugagcaacaagggcgucgacaccgugagcgugggcaacacccucuacuacgucaacaagcaggaggggaagucccuguacgugaagggcgagcccaucaucaacuucuacgacccgcugguguuccccagcgacgaguucgacgccuccaucagccaggucaacgagaagaucaaccagucccuggccuucauccggaaguccgacgagcuccugcacaacgugaacguggggaaguccaccacgaacaucaugaucaccaccaucaucaucgucaucaucgugauccugcuccugcugaucgccgugggccucuuccuguacugcaaggcccgcugaggacuagucccuguucccagagcccacuuuuuuuucuuuuuuugaaauaaaauagccugucuuucagaucucaaaggcucuuuucagagccaccaaaaaaaaaaaaaaaaaaaaaaaaaaaaaaaaaaaaaaaaaaaaaaaaaaaaaaaaaaaaaaaaaaaaaaaaaaaaaaaaaaaaaaaaaaaaaaaaaaaaa

SEQ ID NO: 21499 - RNA, 1880 nt, Artificial Sequence
  mRNA product Design a-1 (hSL-A100) comprising derived and/or modified sequence from HRSV(Memphis-37)__AIY60640.1__F_DSCav1_mut0 (opt1)
aggagagucccgcagucggcguccagcggcucugcuuguucgugugugugucguugcaggccuuauucaagcuuaccauggagcugcccauccucaagaccaacgccaucaccacgauccuggccgcggugacccugugcuucgccagcucccagaacaucaccgaggaguucuaccagagcacgugcuccgccgucagcaagggcuaccucuccgcccugcgcaccgggugguacaccagcgugaucaccaucgagcuguccaacaucaaggagaacaagugcaacggcaccgacgccaaggugaagcucaucaagcaggagcuggacaaguacaagaacgcggucacggagcugcagcuccugaugcagagcaccccggccgccggcuccgggagcgcgaucgccuccggcaucgccgucugcaaggugcugcaccucgagggcgaggugaacaagaucaagaacgcccugcuguccaccaacaaggccgucgugagccucuccaacggggugagcguccugaccuucaaggugcuggaccucaagaacuacaucgacaagcagcugcugcccauccugaacaagcagagcugcuccaucagcaacaucgagaccgucaucgaguuccagcagaagaacaaccgccuccuggagaucacgcgggaguucagcgugaacgcgggcgugaccacccccgucuccaccuacaugcugacgaacagcgagcuccugucccugaucaacgacaugccgaucaccaacgaccagaagaagcucaugagcaacaacgugcagaucgugcgccagcaguccuacagcaucaugugcaucaucaaggaggagguccuggccuacguggugcagcugccccucuacggggucaucgacacccccugcuggaagcugcacaccagcccccugugcacgaccaacaccaaggagggcuccaacaucugccucacccggacggaccgcgggugguacugcgacaacgccggcagcguguccuucuucccgcaggccgagaccugcaagguccagagcaaccggguguucugcgacaccaugaacucccggacccugcccagcgaggugaaccucugcaacaucgacaucuucaaccccaaguacgacugcaagaucaugacguccaagaccgacgucagcuccagcgugaucaccucccugggcgccaucgugagcugcuacgggaagaccaagugcacggcgagcaacaagaaccgcggcaucaucaagaccuucuccaacgggugcgacuacgucagcaacaagggcguggacaccguguccgucggcaacacccuguacuacgugaacaagcaggagggcaagagccucuacgugaagggggagcccaucaucaacuucuacgacccgcuggucuuccccuccgacgaguucgacgccagcaucucccaggugaacgagaagaucaaccagagccuggccuucauccggaaguccgacgagcuccugcacaacgugaacgucggcaagagcaccacgaacaucaugaucaccaccaucaucaucgugaucaucgugauccugcugcuccugaucgccgucgggcuguuccucuacugcaaggcccgcuccacccccgugacgcugagcaaggaccagcuguccgggaucaacaacaucgcguucagcaacugaggacuagucccuguucccagagcccacuuuuuuuucuuuuuuugaaauaaaauagccugucuuucagaucucaaaggcucuuuucagagccaccaaaaaaaaaaaaaaaaaaaaaaaaaaaaaaaaaaaaaaaaaaaaaaaaaaaaaaaaaaaaaaaaaaaaaaaaaaaaaaaaaaaaaaaaaaaaaaaaaaaaa

SEQ ID NO: 21500 - RNA, 1880 nt, Artificial Sequence
  mRNA product Design a-1 (hSL-A100) comprising derived and/or modified sequence from HRSV(Memphis-37)__AIY60640.1__F_DSCav1_mut0 (opt1)
aggagagucccgcagucggcguccagcggcucugcuuguucgugugugugucguugcaggccuuauucaagcuuaccauggagcugcccauccucaagaccaacgccaucaccacgauccuggccgcggugacccugugcuucgccagcucccagaacaucaccgaggaguucuaccagagcacgugcuccgccgucagcaagggcuaccucuccgcccugcgcaccgggugguacaccagcgugaucaccaucgagcuguccaacaucaaggagaacaagugcaacggcaccgacgccaaggugaagcucaucaagcaggagcuggacaaguacaagaacgcggucacggagcugcagcuccugaugcagagcaccccggccgccggguccggcagcgccaucgcguccgggaucgccgugugcaaggugcugcaccucgagggcgaggucaacaagaucaagaacgcccugcugagcaccaacaaggccguggugucccucagcaacggcgucuccgugcugaccuucaaggugcuggaccucaagaacuacaucgacaagcagcugcugcccauccucaacaagcagagcugcuccaucagcaacaucgagacggucaucgaguuccagcagaagaacaaccggcugcuggagaucacccgcgaguucuccgugaacgccggggugaccacccccgucagcacguacaugcucaccaacagcgagcugcugucccucaucaacgacaugcccaucaccaacgaccagaagaagcugaugagcaacaacgugcagaucgugcggcagcaguccuacagcaucaugugcaucaucaaggaggagguccuggcguacguggugcagcucccgcuguacggcgucaucgacacccccugcuggaagcugcacacgagcccccucugcaccaccaacaccaaggagggguccaacaucugccugacgcgcaccgaccggggcugguacugcgacaacgccggguccgugagcuucuucccccaggccgagaccugcaaggugcaguccaaccgcgucuucugcgacaccaugaacagccggacgcucccguccgaggugaaccugugcaacaucgacaucuucaaccccaaguacgacugcaagaucaugaccagcaagaccgacgucuccagcuccgugaucaccagccugggcgccaucguguccugcuacggcaagacgaagugcaccgccagcaacaagaaccgggggaucaucaagaccuucuccaacggcugcgacuacgucagcaacaaggggguggacaccgugagcgucggcaacacgcucuacuacgugaacaagcaggagggcaagucccuguacgugaagggggagcccaucaucaacuucuacgacccccuggucuucccgagcgacgaguucgacgcguccaucagccaggugaacgagaagaucaaccagucccucgccuucauccgcaagagcgacgagcugcugcacaacgugaacgucggcaaguccaccaccaacaucaugaucaccaccaucaucaucgugaucaucgugauccuccugcugcucaucgccgucgggcuguuccuguacugcaaggcccggagcacgcccgugacccuguccaaggaccagcucagcggcaucaacaacaucgccuucuccaacugaggacuagucccuguucccagagcccacuuuuuuuucuuuuuuugaaauaaaauagccugucuuucagaucucaaaggcucuuuucagagccaccaaaaaaaaaaaaaaaaaaaaaaaaaaaaaaaaaaaaaaaaaaaaaaaaaaaaaaaaaaaaaaaaaaaaaaaaaaaaaaaaaaaaaaaaaaaaaaaaaaaaa

SEQ ID NO: 21501 - RNA, 1880 nt, Artificial Sequence
  mRNA product Design a-1 (hSL-A100) comprising derived and/or modified sequence from HRSV(Memphis-37)__AIY60640.1__F_DSCav1_mut0 (opt1)
aggagagucccgcagucggcguccagcggcucugcuuguucgugugugugucguugcaggccuuauucaagcuuaccauggagcugcccauccucaagaccaacgccaucaccacgauccuggccgcggugacccugugcuucgccagcucccagaacaucaccgaggaguucuaccagagcacgugcuccgccgucagcaagggcuaccucuccgcccugcgcaccgggugguacaccagcgugaucaccaucgagcuguccaacaucaaggagaacaagugcaacggcaccgacgccaaggugaagcucaucaagcaggagcuggacaaguacaagaacgcggucacggagcugcagcuccugaugcagagcaccccggccgccggguccggcagcgccaucgcguccgggaucgccgugugcaaggugcugcaccucgagggcgaggucaacaagaucaagaacgcccugcugagcaccaacaaggccguggugucccucagcaacggcgucuccgugcugaccuucaaggugcuggaccucaagaacuacaucgacaagcagcugcugcccauccucaacaagcagagcugcuccaucagcaacaucgagacggucaucgaguuccagcagaagaacaaccggcugcuggagaucacccgcgaguucuccgugaacgccggggugaccacccccgucagcacguacaugcucaccaacagcgagcugcugucccucaucaacgacaugcccaucaccaacgaccagaagaagcugaugagcaacaacgugcagaucgugcggcagcaguccuacagcaucaugugcaucaucaaggaggagguccuggcguacguggugcagcucccgcuguacggcgucaucgacacccccugcuggaagcugcacacgagcccccucugcaccaccaacaccaaggaggggagcaacaucugccugacgcgcaccgaccggggcugguacugcgacaacgccggguccgugagcuucuucccccaggccgagaccugcaaggugcaguccaaccgcgucuucugcgacaccaugaacagccggacgcugccguccgaggugaaccucugcaacaucgacaucuucaaccccaaguacgacugcaagaucaugaccagcaagaccgacgucuccagcuccgugaucaccagccugggcgccaucguguccugcuacggcaagacgaagugcaccgccagcaacaagaaccgcgggaucaucaagaccuucuccaacggcugcgacuacgucagcaacaaggggguggacaccgugagcgucggcaacacgcuguacuacgugaacaagcaggagggcaagucccucuacgugaagggggagcccaucaucaacuucuacgacccccuggucuucccgagcgacgaguucgacgcguccaucagccaggugaacgagaagaucaaccagucccuggccuucauccggaaguccgacgagcuccugcacaacgugaacgucggcaaguccaccaccaacaucaugaucaccaccaucaucaucgugaucaucgugauccugcuccugcugaucgccgucgggcuguuccucuacugcaaggcccgcagcacgcccgugacccuguccaaggaccagcugagcggcaucaacaacaucgccuucuccaacugaggacuagucccuguucccagagcccacuuuuuuuucuuuuuuugaaauaaaauagccugucuuucagaucucaaaggcucuuuucagagccaccaaaaaaaaaaaaaaaaaaaaaaaaaaaaaaaaaaaaaaaaaaaaaaaaaaaaaaaaaaaaaaaaaaaaaaaaaaaaaaaaaaaaaaaaaaaaaaaaaaaaa

SEQ ID NO: 21502 - RNA, 1817 nt, Artificial Sequence
  mRNA product Design a-1 (hSL-A100) comprising derived and/or modified sequence from HRSV(Memphis-37)__AIY60640.1__F-del_DSCav1_mut0 (opt1)
aggagagucccgcagucggcguccagcggcucugcuuguucgugugugugucguugcaggccuuauucaagcuuaccauggagcugcccauccucaagaccaacgccaucaccacgauccuggccgcggugacccugugcuucgccagcucccagaacaucaccgaggaguucuaccagagcacgugcuccgccgucagcaagggcuaccucuccgcccugcgcaccgggugguacaccagcgugaucaccaucgagcuguccaacaucaaggagaacaagugcaacggcaccgacgccaaggugaagcucaucaagcaggagcuggacaaguacaagaacgcggucacggagcugcagcuccugaugcagagcaccccggccgccggcuccgggagcgcgaucgccuccggcaucgccgucugcaaggugcugcaccucgagggcgaggugaacaagaucaagaacgcccugcuguccaccaacaaggccgucgugagccucuccaacggggugagcguccugaccuucaaggugcuggaccucaagaacuacaucgacaagcagcugcugcccauccugaacaagcagagcugcuccaucagcaacaucgagaccgucaucgaguuccagcagaagaacaaccgccuccuggagaucacgcgggaguucagcgugaacgcgggcgugaccacccccgucuccaccuacaugcugacgaacagcgagcuccugucccugaucaacgacaugccgaucaccaacgaccagaagaagcucaugagcaacaacgugcagaucgugcgccagcaguccuacagcaucaugugcaucaucaaggaggagguccuggccuacguggugcagcugccccucuacggggucaucgacacccccugcuggaagcugcacaccagcccccugugcacgaccaacaccaaggagggcuccaacaucugccucacccggacggaccgcgggugguacugcgacaacgccggcagcguguccuucuucccgcaggccgagaccugcaagguccagagcaaccggguguucugcgacaccaugaacucccggacccugcccagcgaggugaaccucugcaacaucgacaucuucaaccccaaguacgacugcaagaucaugacguccaagaccgacgucagcuccagcgugaucaccucccugggcgccaucgugagcugcuacgggaagaccaagugcacggcgagcaacaagaaccgcggcaucaucaagaccuucuccaacgggugcgacuacgucagcaacaagggcguggacaccguguccgucggcaacacccuguacuacgugaacaagcaggagggcaagagccucuacgugaagggggagcccaucaucaacuucuacgacccgcuggucuuccccuccgacgaguucgacgccagcaucucccaggugaacgagaagaucaaccagagccuggccuucauccggaaguccgacgagcuccugcacaacgugaacgucggcaagagcaccacgaacaucaugaucaccaccaucaucaucgugaucaucgugauccugcugcuccugaucgccgucgggcuguuccucuacugcaaggcccgcugaggacuagucccuguucccagagcccacuuuuuuuucuuuuuuugaaauaaaauagccugucuuucagaucucaaaggcucuuuucagagccaccaaaaaaaaaaaaaaaaaaaaaaaaaaaaaaaaaaaaaaaaaaaaaaaaaaaaaaaaaaaaaaaaaaaaaaaaaaaaaaaaaaaaaaaaaaaaaaaaaaaaa

SEQ ID NO: 21503 - RNA, 1817 nt, Artificial Sequence
  mRNA product Design a-1 (hSL-A100) comprising derived and/or modified sequence from HRSV(Memphis-37)__AIY60640.1__F-del_DSCav1_mut0 (opt1)
aggagagucccgcagucggcguccagcggcucugcuuguucgugugugugucguugcaggccuuauucaagcuuaccauggagcugcccauccucaagaccaacgccaucaccacgauccuggccgcggugacccugugcuucgccagcucccagaacaucaccgaggaguucuaccagagcacgugcuccgccgucagcaagggcuaccucuccgcccugcgcaccgggugguacaccagcgugaucaccaucgagcuguccaacaucaaggagaacaagugcaacggcaccgacgccaaggugaagcucaucaagcaggagcuggacaaguacaagaacgcggucacggagcugcagcuccugaugcagagcaccccggccgccggguccggcagcgccaucgcguccgggaucgccgugugcaaggugcugcaccucgagggcgaggucaacaagaucaagaacgcccugcugagcaccaacaaggccguggugucccucagcaacggcgucuccgugcugaccuucaaggugcuggaccucaagaacuacaucgacaagcagcugcugcccauccucaacaagcagagcugcuccaucagcaacaucgagacggucaucgaguuccagcagaagaacaaccggcugcuggagaucacccgcgaguucuccgugaacgccggggugaccacccccgucagcacguacaugcucaccaacagcgagcugcugucccucaucaacgacaugcccaucaccaacgaccagaagaagcugaugagcaacaacgugcagaucgugcggcagcaguccuacagcaucaugugcaucaucaaggaggagguccuggcguacguggugcagcucccgcuguacggcgucaucgacacccccugcuggaagcugcacacgagcccccucugcaccaccaacaccaaggagggguccaacaucugccugacgcgcaccgaccggggcugguacugcgacaacgccggguccgugagcuucuucccccaggccgagaccugcaaggugcaguccaaccgcgucuucugcgacaccaugaacagccggacgcucccguccgaggugaaccugugcaacaucgacaucuucaaccccaaguacgacugcaagaucaugaccagcaagaccgacgucuccagcuccgugaucaccagccugggcgccaucguguccugcuacggcaagacgaagugcaccgccagcaacaagaaccgggggaucaucaagaccuucuccaacggcugcgacuacgucagcaacaaggggguggacaccgugagcgucggcaacacgcucuacuacgugaacaagcaggagggcaagucccuguacgugaagggggagcccaucaucaacuucuacgacccccuggucuucccgagcgacgaguucgacgcguccaucagccaggugaacgagaagaucaaccagucccucgccuucauccgcaagagcgacgagcugcugcacaacgugaacgucggcaaguccaccaccaacaucaugaucaccaccaucaucaucgugaucaucgugauccuccugcugcucaucgccgucgggcuguuccuguacugcaaggcccggugaggacuagucccuguucccagagcccacuuuuuuuucuuuuuuugaaauaaaauagccugucuuucagaucucaaaggcucuuuucagagccaccaaaaaaaaaaaaaaaaaaaaaaaaaaaaaaaaaaaaaaaaaaaaaaaaaaaaaaaaaaaaaaaaaaaaaaaaaaaaaaaaaaaaaaaaaaaaaaaaaaaaa

SEQ ID NO: 21504 - RNA, 1817 nt, Artificial Sequence
  mRNA product Design a-1 (hSL-A100) comprising derived and/or modified sequence from HRSV(Memphis-37)__AIY60640.1__F-del_DSCav1_mut0 (opt1)
aggagagucccgcagucggcguccagcggcucugcuuguucgugugugugucguugcaggccuuauucaagcuuaccauggagcugcccauccucaagaccaacgccaucaccacgauccuggccgcggugacccugugcuucgccagcucccagaacaucaccgaggaguucuaccagagcacgugcuccgccgucagcaagggcuaccucuccgcccugcgcaccgggugguacaccagcgugaucaccaucgagcuguccaacaucaaggagaacaagugcaacggcaccgacgccaaggugaagcucaucaagcaggagcuggacaaguacaagaacgcggucacggagcugcagcuccugaugcagagcaccccggccgccggguccggcagcgccaucgcguccgggaucgccgugugcaaggugcugcaccucgagggcgaggucaacaagaucaagaacgcccugcugagcaccaacaaggccguggugucccucagcaacggcgucuccgugcugaccuucaaggugcuggaccucaagaacuacaucgacaagcagcugcugcccauccucaacaagcagagcugcuccaucagcaacaucgagacggucaucgaguuccagcagaagaacaaccggcugcuggagaucacccgcgaguucuccgugaacgccggggugaccacccccgucagcacguacaugcucaccaacagcgagcugcugucccucaucaacgacaugcccaucaccaacgaccagaagaagcugaugagcaacaacgugcagaucgugcggcagcaguccuacagcaucaugugcaucaucaaggaggagguccuggcguacguggugcagcucccgcuguacggcgucaucgacacccccugcuggaagcugcacacgagcccccucugcaccaccaacaccaaggaggggagcaacaucugccugacgcgcaccgaccggggcugguacugcgacaacgccggguccgugagcuucuucccccaggccgagaccugcaaggugcaguccaaccgcgucuucugcgacaccaugaacagccggacgcugccguccgaggugaaccucugcaacaucgacaucuucaaccccaaguacgacugcaagaucaugaccagcaagaccgacgucuccagcuccgugaucaccagccugggcgccaucguguccugcuacggcaagacgaagugcaccgccagcaacaagaaccgcgggaucaucaagaccuucuccaacggcugcgacuacgucagcaacaaggggguggacaccgugagcgucggcaacacgcuguacuacgugaacaagcaggagggcaagucccucuacgugaagggggagcccaucaucaacuucuacgacccccuggucuucccgagcgacgaguucgacgcguccaucagccaggugaacgagaagaucaaccagucccuggccuucauccggaaguccgacgagcuccugcacaacgugaacgucggcaaguccaccaccaacaucaugaucaccaccaucaucaucgugaucaucgugauccugcuccugcugaucgccgucgggcuguuccucuacugcaaggcccgcugaggacuagucccuguucccagagcccacuuuuuuuucuuuuuuugaaauaaaauagccugucuuucagaucucaaaggcucuuuucagagccaccaaaaaaaaaaaaaaaaaaaaaaaaaaaaaaaaaaaaaaaaaaaaaaaaaaaaaaaaaaaaaaaaaaaaaaaaaaaaaaaaaaaaaaaaaaaaaaaaaaaaa

SEQ ID NO: 21505 - RNA, 1880 nt, Artificial Sequence
  mRNA product Design a-1 (hSL-A100) comprising derived and/or modified sequence from HRSV(Memphis-37)__AIY60640.1__F_DSCav1_mut1 (opt1)
aggagagucccgcagucggcguccagcggcucugcuuguucgugugugugucguugcaggccuuauucaagcuuaccauggagcugcccauccucaagaccaacgccaucaccacgauccuggccgcggugacccugugcuucgccagcucccagaacaucaccgaggaguucuaccagagcacgugcuccgccgucagcaagggcuaccucggcgcccugcgcaccgggugguacaccagcgugaucaccaucgagcuguccaacaucaaggagaacaagugcaacggcaccgacgccaaggugaagcucaucaagcaggagcuggacaaguacaagaacgcggucacggagcugcagcuccugaugcagagcaccccggccgccggcuccgggagcgcgaucugcuccggcaucgccgucugcaaggugcugcaccucgagggcgaggugaacaagaucaagaacgcccugcuguccaccaacaaggccgucgugagccucuccaacggggugagcguccugaccuucaaggugcuggaccucaagaacuacaucgacaagcagcugcugcccauccugaacaagcagagcugcuccauccccaacaucgagaccgucaucgaguuccagcagaagaacaaccgccuccuggagaucacgcgggaguucagcgugaacgcgggcgugaccacccccgucuccaccuacaugcugacgaacagcgagcuccugucccugaucaacgacaugccgaucaccaacgaccagaagaagcucaugagcaacaacgugcagaucgugcgccagcaguccuacagcaucaugugcaucaucaaggaggagguccuggccuacguggugcagcugccccucuacggggucaucgacacccccugcuggaagcugcacaccagcccccugugcacgaccaacaccaaggagggcuccaacaucugccucacccggacggaccgcgggugguacugcgacaacgccggcagcguguccuucuucccgcaggccgagaccugcaagguccagagcaaccggguguucugcgacaccaugaacucccugacccugcccagcgaggugaaccucugcaacaucgacaucuucaaccccaaguacgacugcaagaucaugacguccaagaccgacgucagcuccagcgugaucaccucccugggcgccaucgugagcugcuacgggaagaccaagugcacggcgagcaacaagaaccgcggcaucaucaagaccuucuccaacgggugcgacuacgucagcaacaagggcguggacaccguguccgucggcaacacccuguacugcgugaacaagcaggagggccagagccucuacgugaagggggagcccaucaucaacuucuacgacccgcuggucuuccccuccgacgaguucgacgccagcaucucccaggugaacgagaagaucaaccagagccuggccuucauccggaaguccgacgagcuccugcacaacgugaacgucggcaagagcaccacgaacaucaugaucaccaccaucaucaucgugaucaucgugauccugcugcuccugaucgccgucgggcuguuccucuacugcaaggcccgcuccacccccgugacgcugagcaaggaccagcuguccgggaucaacaacaucgcguucagcaacugaggacuagucccuguucccagagcccacuuuuuuuucuuuuuuugaaauaaaauagccugucuuucagaucucaaaggcucuuuucagagccaccaaaaaaaaaaaaaaaaaaaaaaaaaaaaaaaaaaaaaaaaaaaaaaaaaaaaaaaaaaaaaaaaaaaaaaaaaaaaaaaaaaaaaaaaaaaaaaaaaaaaa

SEQ ID NO: 21506 - RNA, 1880 nt, Artificial Sequence
  mRNA product Design a-1 (hSL-A100) comprising derived and/or modified sequence from HRSV(Memphis-37)__AIY60640.1__F_DSCav1_mut1 (opt1)
aggagagucccgcagucggcguccagcggcucugcuuguucgugugugugucguugcaggccuuauucaagcuuaccauggagcugcccauccucaagaccaacgccaucaccacgauccuggccgcggugacccugugcuucgccagcucccagaacaucaccgaggaguucuaccagagcacgugcuccgccgucagcaagggcuaccucggggcccugcgcaccggcugguacaccuccgugaucaccaucgagcugagcaacaucaaggagaacaagugcaacgggaccgacgccaaggugaagcucaucaagcaggagcuggacaaguacaagaacgcggucacggagcugcagcuccugaugcaguccaccccggccgccggcagcggguccgccaucugcagcggcaucgcggugugcaaggugcugcaccucgagggcgaggucaacaagaucaagaacgcccugcuguccaccaacaaggccguggugagccucuccaacggggucagcgugcugaccuucaaggugcuggaccucaagaacuacaucgacaagcagcugcugcccauccucaacaagcaguccugcagcauccccaacaucgagacggucaucgaguuccagcagaagaacaaccggcugcuggagaucacccgcgaguucuccgugaacgccggcgugaccacccccgucagcacguacaugcucaccaacuccgagcugcugagccucaucaacgacaugccgaucaccaacgaccagaagaagcugaugagcaacaacgugcagaucgugcggcagcaguccuacagcaucaugugcaucaucaaggaggagguccuggccuacguggugcagcucccccuguacggggucaucgacacccccugcuggaagcugcacacgagcccccucugcaccaccaacaccaaggagggcuccaacaucugccugacgcgcaccgaccgggggugguacugcgacaacgcgggcuccgugagcuucuucccgcaggccgagaccugcaaggugcaguccaaccgcgucuucugcgacaccaugaacagccugacgcuccccuccgaggugaaccugugcaacaucgacaucuucaaccccaaguacgacugcaagaucaugaccagcaagaccgacgucuccagcuccgugaucaccagccugggcgccaucguguccugcuacgggaagacgaagugcaccgccagcaacaagaaccggggcaucaucaagaccuucuccaacgggugcgacuacgucagcaacaagggcguggacaccguguccgucggcaacacgcucuacugcgugaacaagcaggaggggcagagccuguacgugaagggcgagcccaucaucaacuucuacgacccgcuggucuuccccagcgacgaguucgacgccuccaucagccaggugaacgagaagaucaaccagucccucgcguucauccgcaagagcgacgagcugcugcacaacgugaacgucgggaaguccaccaccaacaucaugaucaccaccaucaucaucgugaucaucgugauccuccugcugcucaucgccgucggccuguuccuguacugcaaggcccggagcacgcccgugacccuguccaaggaccagcucagcgggaucaacaacaucgccuucuccaacugaggacuagucccuguucccagagcccacuuuuuuuucuuuuuuugaaauaaaauagccugucuuucagaucucaaaggcucuuuucagagccaccaaaaaaaaaaaaaaaaaaaaaaaaaaaaaaaaaaaaaaaaaaaaaaaaaaaaaaaaaaaaaaaaaaaaaaaaaaaaaaaaaaaaaaaaaaaaaaaaaaaaa

SEQ ID NO: 21507 - RNA, 1880 nt, Artificial Sequence
  mRNA product Design a-1 (hSL-A100) comprising derived and/or modified sequence from HRSV(Memphis-37)__AIY60640.1__F_DSCav1_mut1 (opt1)
aggagagucccgcagucggcguccagcggcucugcuuguucgugugugugucguugcaggccuuauucaagcuuaccauggagcugcccauccucaagaccaacgccaucaccacgauccuggccgcggugacccugugcuucgccagcucccagaacaucaccgaggaguucuaccagagcacgugcuccgccgucagcaagggcuaccucggggcccugcgcaccggcugguacaccuccgugaucaccaucgagcugagcaacaucaaggagaacaagugcaacgggaccgacgccaaggugaagcucaucaagcaggagcuggacaaguacaagaacgcggucacggagcugcagcuccugaugcaguccaccccggccgccggcagcggguccgccaucugcagcggcaucgcggugugcaaggugcugcaccucgagggcgaggucaacaagaucaagaacgcccugcuguccaccaacaaggccguggugagccucuccaacggggucagcgugcugaccuucaaggugcuggaccucaagaacuacaucgacaagcagcugcugcccauccucaacaagcaguccugcagcauccccaacaucgagacggucaucgaguuccagcagaagaacaaccggcugcuggagaucacccgcgaguucuccgugaacgccggcgugaccacccccgucagcacguacaugcucaccaacuccgagcugcugagccucaucaacgacaugccgaucaccaacgaccagaagaagcugaugagcaacaacgugcagaucgugcggcagcaguccuacagcaucaugugcaucaucaaggaggagguccuggccuacguggugcagcucccccuguacggggucaucgacacccccugcuggaagcugcacacgagcccccucugcaccaccaacaccaaggagggcuccaacaucugccugacgcgcaccgaccgggggugguacugcgacaacgcgggcuccgugagcuucuucccgcaggccgagaccugcaaggugcaguccaaccgcgucuucugcgacaccaugaacagccugacgcuccccuccgaggugaaccugugcaacaucgacaucuucaaccccaaguacgacugcaagaucaugaccagcaagaccgacgucuccagcuccgugaucaccagccugggcgccaucguguccugcuacgggaagacgaagugcaccgccagcaacaagaaccggggcaucaucaagaccuucuccaacgggugcgacuacgucagcaacaagggcguggacaccguguccgucggcaacacgcucuacugcgugaacaagcaggaggggcagagccuguacgugaagggcgagcccaucaucaacuucuacgacccgcuggucuuccccagcgacgaguucgacgccuccaucagccaggugaacgagaagaucaaccagucccucgcguucauccgcaagagcgacgagcugcugcacaacgugaacgucgggaaguccaccaccaacaucaugaucaccaccaucaucaucgugaucaucgugauccuccugcugcugaucgccgucggccucuuccuguacugcaaggcccggagcacgcccgugacccuguccaaggaccagcucagcgggaucaacaacaucgccuucuccaacugaggacuagucccuguucccagagcccacuuuuuuuucuuuuuuugaaauaaaauagccugucuuucagaucucaaaggcucuuuucagagccaccaaaaaaaaaaaaaaaaaaaaaaaaaaaaaaaaaaaaaaaaaaaaaaaaaaaaaaaaaaaaaaaaaaaaaaaaaaaaaaaaaaaaaaaaaaaaaaaaaaaaa

SEQ ID NO: 21508 - RNA, 1817 nt, Artificial Sequence
  mRNA product Design a-1 (hSL-A100) comprising derived and/or modified sequence from HRSV(Memphis-37)__AIY60640.1__F-del_DSCav1_mut1 (opt1)
aggagagucccgcagucggcguccagcggcucugcuuguucgugugugugucguugcaggccuuauucaagcuuaccauggagcugcccauccucaagaccaacgccaucaccacgauccuggccgcggugacccugugcuucgccagcucccagaacaucaccgaggaguucuaccagagcacgugcuccgccgucagcaagggcuaccucggcgcccugcgcaccgggugguacaccagcgugaucaccaucgagcuguccaacaucaaggagaacaagugcaacggcaccgacgccaaggugaagcucaucaagcaggagcuggacaaguacaagaacgcggucacggagcugcagcuccugaugcagagcaccccggccgccggcuccgggagcgcgaucugcuccggcaucgccgucugcaaggugcugcaccucgagggcgaggugaacaagaucaagaacgcccugcuguccaccaacaaggccgucgugagccucuccaacggggugagcguccugaccuucaaggugcuggaccucaagaacuacaucgacaagcagcugcugcccauccugaacaagcagagcugcuccauccccaacaucgagaccgucaucgaguuccagcagaagaacaaccgccuccuggagaucacgcgggaguucagcgugaacgcgggcgugaccacccccgucuccaccuacaugcugacgaacagcgagcuccugucccugaucaacgacaugccgaucaccaacgaccagaagaagcucaugagcaacaacgugcagaucgugcgccagcaguccuacagcaucaugugcaucaucaaggaggagguccuggccuacguggugcagcugccccucuacggggucaucgacacccccugcuggaagcugcacaccagcccccugugcacgaccaacaccaaggagggcuccaacaucugccucacccggacggaccgcgggugguacugcgacaacgccggcagcguguccuucuucccgcaggccgagaccugcaagguccagagcaaccggguguucugcgacaccaugaacucccugacccugcccagcgaggugaaccucugcaacaucgacaucuucaaccccaaguacgacugcaagaucaugacguccaagaccgacgucagcuccagcgugaucaccucccugggcgccaucgugagcugcuacgggaagaccaagugcacggcgagcaacaagaaccgcggcaucaucaagaccuucuccaacgggugcgacuacgucagcaacaagggcguggacaccguguccgucggcaacacccuguacugcgugaacaagcaggagggccagagccucuacgugaagggggagcccaucaucaacuucuacgacccgcuggucuuccccuccgacgaguucgacgccagcaucucccaggugaacgagaagaucaaccagagccuggccuucauccggaaguccgacgagcuccugcacaacgugaacgucggcaagagcaccacgaacaucaugaucaccaccaucaucaucgugaucaucgugauccugcugcuccugaucgccgucgggcuguuccucuacugcaaggcccgcugaggacuagucccuguucccagagcccacuuuuuuuucuuuuuuugaaauaaaauagccugucuuucagaucucaaaggcucuuuucagagccaccaaaaaaaaaaaaaaaaaaaaaaaaaaaaaaaaaaaaaaaaaaaaaaaaaaaaaaaaaaaaaaaaaaaaaaaaaaaaaaaaaaaaaaaaaaaaaaaaaaaaa

SEQ ID NO: 21509 - RNA, 1817 nt, Artificial Sequence
  mRNA product Design a-1 (hSL-A100) comprising derived and/or modified sequence from HRSV(Memphis-37)__AIY60640.1__F-del_DSCav1_mut1 (opt1)
aggagagucccgcagucggcguccagcggcucugcuuguucgugugugugucguugcaggccuuauucaagcuuaccauggagcugcccauccucaagaccaacgccaucaccacgauccuggccgcggugacccugugcuucgccagcucccagaacaucaccgaggaguucuaccagagcacgugcuccgccgucagcaagggcuaccucggggcccugcgcaccggcugguacaccuccgugaucaccaucgagcugagcaacaucaaggagaacaagugcaacgggaccgacgccaaggugaagcucaucaagcaggagcuggacaaguacaagaacgcggucacggagcugcagcuccugaugcaguccaccccggccgccggcagcggguccgccaucugcagcggcaucgcggugugcaaggugcugcaccucgagggcgaggucaacaagaucaagaacgcccugcuguccaccaacaaggccguggugagccucuccaacggggucagcgugcugaccuucaaggugcuggaccucaagaacuacaucgacaagcagcugcugcccauccucaacaagcaguccugcagcauccccaacaucgagacggucaucgaguuccagcagaagaacaaccggcugcuggagaucacccgcgaguucuccgugaacgccggcgugaccacccccgucagcacguacaugcucaccaacuccgagcugcugagccucaucaacgacaugccgaucaccaacgaccagaagaagcugaugagcaacaacgugcagaucgugcggcagcaguccuacagcaucaugugcaucaucaaggaggagguccuggccuacguggugcagcucccccuguacggggucaucgacacccccugcuggaagcugcacacgagcccccucugcaccaccaacaccaaggagggcuccaacaucugccugacgcgcaccgaccgggggugguacugcgacaacgcgggcuccgugagcuucuucccgcaggccgagaccugcaaggugcaguccaaccgcgucuucugcgacaccaugaacagccugacgcuccccuccgaggugaaccugugcaacaucgacaucuucaaccccaaguacgacugcaagaucaugaccagcaagaccgacgucuccagcuccgugaucaccagccugggcgccaucguguccugcuacgggaagacgaagugcaccgccagcaacaagaaccggggcaucaucaagaccuucuccaacgggugcgacuacgucagcaacaagggcguggacaccguguccgucggcaacacgcucuacugcgugaacaagcaggaggggcagagccuguacgugaagggcgagcccaucaucaacuucuacgacccgcuggucuuccccagcgacgaguucgacgccuccaucagccaggugaacgagaagaucaaccagucccucgcguucauccgcaagagcgacgagcugcugcacaacgugaacgucgggaaguccaccaccaacaucaugaucaccaccaucaucaucgugaucaucgugauccuccugcugcucaucgccgucggccuguuccuguacugcaaggcccggugaggacuagucccuguucccagagcccacuuuuuuuucuuuuuuugaaauaaaauagccugucuuucagaucucaaaggcucuuuucagagccaccaaaaaaaaaaaaaaaaaaaaaaaaaaaaaaaaaaaaaaaaaaaaaaaaaaaaaaaaaaaaaaaaaaaaaaaaaaaaaaaaaaaaaaaaaaaaaaaaaaaaa

SEQ ID NO: 21510 - RNA, 1817 nt, Artificial Sequence
  mRNA product Design a-1 (hSL-A100) comprising derived and/or modified sequence from HRSV(Memphis-37)__AIY60640.1__F-del_DSCav1_mut1 (opt1)
aggagagucccgcagucggcguccagcggcucugcuuguucgugugugugucguugcaggccuuauucaagcuuaccauggagcugcccauccucaagaccaacgccaucaccacgauccuggccgcggugacccugugcuucgccagcucccagaacaucaccgaggaguucuaccagagcacgugcuccgccgucagcaagggcuaccucggggcccugcgcaccggcugguacaccuccgugaucaccaucgagcugagcaacaucaaggagaacaagugcaacgggaccgacgccaaggugaagcucaucaagcaggagcuggacaaguacaagaacgcggucacggagcugcagcuccugaugcaguccaccccggccgccggcagcggguccgccaucugcagcggcaucgcggugugcaaggugcugcaccucgagggcgaggucaacaagaucaagaacgcccugcuguccaccaacaaggccguggugagccucuccaacggggucagcgugcugaccuucaaggugcuggaccucaagaacuacaucgacaagcagcugcugcccauccucaacaagcaguccugcagcauccccaacaucgagacggucaucgaguuccagcagaagaacaaccggcugcuggagaucacccgcgaguucuccgugaacgccggcgugaccacccccgucagcacguacaugcucaccaacuccgagcugcugagccucaucaacgacaugccgaucaccaacgaccagaagaagcugaugagcaacaacgugcagaucgugcggcagcaguccuacagcaucaugugcaucaucaaggaggagguccuggccuacguggugcagcucccccuguacggggucaucgacacccccugcuggaagcugcacacgagcccccucugcaccaccaacaccaaggagggcuccaacaucugccugacgcgcaccgaccgggggugguacugcgacaacgcgggcuccgugagcuucuucccgcaggccgagaccugcaaggugcaguccaaccgcgucuucugcgacaccaugaacagccugacgcuccccuccgaggugaaccugugcaacaucgacaucuucaaccccaaguacgacugcaagaucaugaccagcaagaccgacgucuccagcuccgugaucaccagccugggcgccaucguguccugcuacgggaagacgaagugcaccgccagcaacaagaaccggggcaucaucaagaccuucuccaacgggugcgacuacgucagcaacaagggcguggacaccguguccgucggcaacacgcucuacugcgugaacaagcaggaggggcagagccuguacgugaagggcgagcccaucaucaacuucuacgacccgcuggucuuccccagcgacgaguucgacgccuccaucagccaggugaacgagaagaucaaccagucccucgcguucauccgcaagagcgacgagcugcugcacaacgugaacgucgggaaguccaccaccaacaucaugaucaccaccaucaucaucgugaucaucgugauccuccugcugcugaucgccgucggccucuuccuguacugcaaggcccggugaggacuagucccuguucccagagcccacuuuuuuuucuuuuuuugaaauaaaauagccugucuuucagaucucaaaggcucuuuucagagccaccaaaaaaaaaaaaaaaaaaaaaaaaaaaaaaaaaaaaaaaaaaaaaaaaaaaaaaaaaaaaaaaaaaaaaaaaaaaaaaaaaaaaaaaaaaaaaaaaaaaaa

SEQ ID NO: 21511 - RNA, 1880 nt, Artificial Sequence
  mRNA product Design a-1 (hSL-A100) comprising derived and/or modified sequence from HRSV(Memphis-37)__AIY60640.1__F_DSCav1_mut2 (opt1)
aggagagucccgcagucggcguccagcggcucugcuuguucgugugugugucguugcaggccuuauucaagcuuaccauggagcugcccauccucaagaccaacgccaucaccacgauccuggccgcggugacccugugcuucgccagcucccagaacaucaccgaggaguucuaccagagcacgugcuccgccgucagcaagggcuaccucggcgcccugcgcaccgggugguacaccagcgugaucaccaucgagcuguccaacaucaaggagaacaagugcaacggcaccgacgccaaggugaagcucaucaagcaggagcuggacaaguacaagaacgcggucacggaccugcagcuccugaugcagagcaccccggccgccggcuccgggagcgcgaucugcuccggcaucgccgucugcaaggugcugcaccucgagggcgaggugaacaagaucaagaacgcccugcuguccaccaacaaggccgucgugagccucuccaacggggugagcguccugaccuucaaggugcuggaccucaagaacuacaucgacaagcagcugcugcccauccugaacaagcagagcugcuccauccccaacaucgagaccgucaucgaguuccagcagaagaacaaccgccuccuggagaucacgcgggaguucagcgugaacgcgggcgugaccacccccgucuccaccuacaugcugacgaacagcgagcuccugucccugaucaacgacaugccgaucaccaacgaccagaagaagcucaugagcaacaacgugcagaucgugcgccagcaguccuacagcaucaugugcaucaucaaggaggagguccuggccuacguggugcagcugccccucuacggggucaucgacacccccugcuggaagcugcacaccagcccccugugcacgaccaacaccaaggagggcuccaacaucugccucacccggacggaccgcgggugguacugcgacaacgccggcagcguguccuucuucccgcaggccgagaccugcaagguccagagcaaccggguguucugcgacaccaugaacucccugacccugcccagcgaggugaaccucugcaacaucgacaucuucaaccccaaguacgacugcaagaucaugacguccaagaccgacgucagcuccagcgugaucaccucccugggcgccaucgugagcugcuacgggaagaccaagugcacggcgagcaacaagaaccgcggcaucaucaagaccuucuccaacgggugcgacuacgucagcaacaagggcguggacaccguguccgucggcaacacccuguacugcgugaacaagcaggagggccagagccucuacgugaagggggagcccaucaucaacuucuacgacccgcuggucuuccccuccgacgaguucgacgccagcaucucccaggugaacgagaagaucaaccagagccuggccuucauccggaaguccgacgagcuccugcacaacgugaacgucggcaagagcaccacgaacaucaugaucaccaccaucaucaucgugaucaucgugauccugcugcuccugaucgccgucgggcuguuccucuacugcaaggcccgcuccacccccgugacgcugagcaaggaccagcuguccgggaucaacaacaucgcguucagcaacugaggacuagucccuguucccagagcccacuuuuuuuucuuuuuuugaaauaaaauagccugucuuucagaucucaaaggcucuuuucagagccaccaaaaaaaaaaaaaaaaaaaaaaaaaaaaaaaaaaaaaaaaaaaaaaaaaaaaaaaaaaaaaaaaaaaaaaaaaaaaaaaaaaaaaaaaaaaaaaaaaaaaa

SEQ ID NO: 21512 - RNA, 1880 nt, Artificial Sequence
  mRNA product Design a-1 (hSL-A100) comprising derived and/or modified sequence from HRSV(Memphis-37)__AIY60640.1__F_DSCav1_mut2 (opt1)
aggagagucccgcagucggcguccagcggcucugcuuguucgugugugugucguugcaggccuuauucaagcuuaccauggagcugcccauccucaagaccaacgccaucaccacgauccuggccgcggugacccugugcuucgccagcucccagaacaucaccgaggaguucuaccagagcacgugcuccgccgucagcaagggcuaccucggggcccugcgcaccggcugguacaccuccgugaucaccaucgagcugagcaacaucaaggagaacaagugcaacgggaccgacgccaaggugaagcucaucaagcaggagcuggacaaguacaagaacgcggucacggaccugcagcuccugaugcaguccaccccggccgccggcagcggguccgccaucugcagcggcaucgcggugugcaaggugcugcaccucgagggcgaggucaacaagaucaagaacgcccugcuguccaccaacaaggccguggugagccucuccaacggggucagcgugcugaccuucaaggugcuggaccucaagaacuacaucgacaagcagcugcugcccauccucaacaagcaguccugcagcauccccaacaucgagacggucaucgaguuccagcagaagaacaaccggcugcuggagaucacccgcgaguucuccgugaacgccggcgugaccacccccgucagcacguacaugcucaccaacuccgagcugcugagccucaucaacgacaugccgaucaccaacgaccagaagaagcugaugagcaacaacgugcagaucgugcggcagcaguccuacagcaucaugugcaucaucaaggaggagguccuggccuacguggugcagcucccccuguacggggucaucgacacccccugcuggaagcugcacacgagcccccucugcaccaccaacaccaaggagggcuccaacaucugccugacgcgcaccgaccgggggugguacugcgacaacgcgggcuccgugagcuucuucccgcaggccgagaccugcaaggugcaguccaaccgcgucuucugcgacaccaugaacagccugacgcuccccuccgaggugaaccugugcaacaucgacaucuucaaccccaaguacgacugcaagaucaugaccagcaagaccgacgucuccagcuccgugaucaccagccugggcgccaucguguccugcuacgggaagacgaagugcaccgccagcaacaagaaccggggcaucaucaagaccuucuccaacgggugcgacuacgucagcaacaagggcguggacaccguguccgucggcaacacgcucuacugcgugaacaagcaggaggggcagagccuguacgugaagggcgagcccaucaucaacuucuacgacccgcuggucuuccccagcgacgaguucgacgccuccaucagccaggugaacgagaagaucaaccagucccucgcguucauccgcaagagcgacgagcugcugcacaacgugaacgucgggaaguccaccaccaacaucaugaucaccaccaucaucaucgugaucaucgugauccuccugcugcucaucgccgucggccuguuccuguacugcaaggcccggagcacgcccgugacccuguccaaggaccagcucagcgggaucaacaacaucgccuucuccaacugaggacuagucccuguucccagagcccacuuuuuuuucuuuuuuugaaauaaaauagccugucuuucagaucucaaaggcucuuuucagagccaccaaaaaaaaaaaaaaaaaaaaaaaaaaaaaaaaaaaaaaaaaaaaaaaaaaaaaaaaaaaaaaaaaaaaaaaaaaaaaaaaaaaaaaaaaaaaaaaaaaaaa

SEQ ID NO: 21513 - RNA, 1880 nt, Artificial Sequence
  mRNA product Design a-1 (hSL-A100) comprising derived and/or modified sequence from HRSV(Memphis-37)__AIY60640.1__F_DSCav1_mut2 (opt1)
aggagagucccgcagucggcguccagcggcucugcuuguucgugugugugucguugcaggccuuauucaagcuuaccauggagcugcccauccucaagaccaacgccaucaccacgauccuggccgcggugacccugugcuucgccagcucccagaacaucaccgaggaguucuaccagagcacgugcuccgccgucagcaagggcuaccucggggcccugcgcaccggcugguacaccuccgugaucaccaucgagcugagcaacaucaaggagaacaagugcaacgggaccgacgccaaggugaagcucaucaagcaggagcuggacaaguacaagaacgcggucacggaccugcagcuccugaugcaguccaccccggccgccggcagcggguccgccaucugcagcggcaucgcggugugcaaggugcugcaccucgagggcgaggucaacaagaucaagaacgcccugcuguccaccaacaaggccguggugagccucuccaacggggucagcgugcugaccuucaaggugcuggaccucaagaacuacaucgacaagcagcugcugcccauccucaacaagcaguccugcagcauccccaacaucgagacggucaucgaguuccagcagaagaacaaccggcugcuggagaucacccgcgaguucuccgugaacgccggcgugaccacccccgucagcacguacaugcucaccaacuccgagcugcugagccucaucaacgacaugccgaucaccaacgaccagaagaagcugaugagcaacaacgugcagaucgugcggcagcaguccuacagcaucaugugcaucaucaaggaggagguccuggccuacguggugcagcucccccuguacggggucaucgacacccccugcuggaagcugcacacgagcccccucugcaccaccaacaccaaggagggcuccaacaucugccugacgcgcaccgaccgggggugguacugcgacaacgcgggcuccgugagcuucuucccgcaggccgagaccugcaaggugcaguccaaccgcgucuucugcgacaccaugaacagccugacgcuccccuccgaggugaaccugugcaacaucgacaucuucaaccccaaguacgacugcaagaucaugaccagcaagaccgacgucuccagcuccgugaucaccagccugggcgccaucguguccugcuacgggaagacgaagugcaccgccagcaacaagaaccggggcaucaucaagaccuucuccaacgggugcgacuacgucagcaacaagggcguggacaccguguccgucggcaacacgcucuacugcgugaacaagcaggaggggcagagccuguacgugaagggcgagcccaucaucaacuucuacgacccgcuggucuuccccagcgacgaguucgacgccuccaucagccaggugaacgagaagaucaaccagucccucgcguucauccgcaagagcgacgagcugcugcacaacgugaacgucgggaaguccaccaccaacaucaugaucaccaccaucaucaucgugaucaucgugauccuccugcugcugaucgccgucggccucuuccuguacugcaaggcccggagcacgcccgugacccuguccaaggaccagcucagcgggaucaacaacaucgccuucuccaacugaggacuagucccuguucccagagcccacuuuuuuuucuuuuuuugaaauaaaauagccugucuuucagaucucaaaggcucuuuucagagccaccaaaaaaaaaaaaaaaaaaaaaaaaaaaaaaaaaaaaaaaaaaaaaaaaaaaaaaaaaaaaaaaaaaaaaaaaaaaaaaaaaaaaaaaaaaaaaaaaaaaaa

SEQ ID NO: 21514 - RNA, 1817 nt, Artificial Sequence
  mRNA product Design a-1 (hSL-A100) comprising derived and/or modified sequence from HRSV(Memphis-37)__AIY60640.1__F-del_DSCav1_mut2 (opt1)
aggagagucccgcagucggcguccagcggcucugcuuguucgugugugugucguugcaggccuuauucaagcuuaccauggagcugcccauccucaagaccaacgccaucaccacgauccuggccgcggugacccugugcuucgccagcucccagaacaucaccgaggaguucuaccagagcacgugcuccgccgucagcaagggcuaccucggcgcccugcgcaccgggugguacaccagcgugaucaccaucgagcuguccaacaucaaggagaacaagugcaacggcaccgacgccaaggugaagcucaucaagcaggagcuggacaaguacaagaacgcggucacggaccugcagcuccugaugcagagcaccccggccgccggcuccgggagcgcgaucugcuccggcaucgccgucugcaaggugcugcaccucgagggcgaggugaacaagaucaagaacgcccugcuguccaccaacaaggccgucgugagccucuccaacggggugagcguccugaccuucaaggugcuggaccucaagaacuacaucgacaagcagcugcugcccauccugaacaagcagagcugcuccauccccaacaucgagaccgucaucgaguuccagcagaagaacaaccgccuccuggagaucacgcgggaguucagcgugaacgcgggcgugaccacccccgucuccaccuacaugcugacgaacagcgagcuccugucccugaucaacgacaugccgaucaccaacgaccagaagaagcucaugagcaacaacgugcagaucgugcgccagcaguccuacagcaucaugugcaucaucaaggaggagguccuggccuacguggugcagcugccccucuacggggucaucgacacccccugcuggaagcugcacaccagcccccugugcacgaccaacaccaaggagggcuccaacaucugccucacccggacggaccgcgggugguacugcgacaacgccggcagcguguccuucuucccgcaggccgagaccugcaagguccagagcaaccggguguucugcgacaccaugaacucccugacccugcccagcgaggugaaccucugcaacaucgacaucuucaaccccaaguacgacugcaagaucaugacguccaagaccgacgucagcuccagcgugaucaccucccugggcgccaucgugagcugcuacgggaagaccaagugcacggcgagcaacaagaaccgcggcaucaucaagaccuucuccaacgggugcgacuacgucagcaacaagggcguggacaccguguccgucggcaacacccuguacugcgugaacaagcaggagggccagagccucuacgugaagggggagcccaucaucaacuucuacgacccgcuggucuuccccuccgacgaguucgacgccagcaucucccaggugaacgagaagaucaaccagagccuggccuucauccggaaguccgacgagcuccugcacaacgugaacgucggcaagagcaccacgaacaucaugaucaccaccaucaucaucgugaucaucgugauccugcugcuccugaucgccgucgggcuguuccucuacugcaaggcccgcugaggacuagucccuguucccagagcccacuuuuuuuucuuuuuuugaaauaaaauagccugucuuucagaucucaaaggcucuuuucagagccaccaaaaaaaaaaaaaaaaaaaaaaaaaaaaaaaaaaaaaaaaaaaaaaaaaaaaaaaaaaaaaaaaaaaaaaaaaaaaaaaaaaaaaaaaaaaaaaaaaaaaa

SEQ ID NO: 21515 - RNA, 1817 nt, Artificial Sequence
  mRNA product Design a-1 (hSL-A100) comprising derived and/or modified sequence from HRSV(Memphis-37)__AIY60640.1__F-del_DSCav1_mut2 (opt1)
aggagagucccgcagucggcguccagcggcucugcuuguucgugugugugucguugcaggccuuauucaagcuuaccauggagcugcccauccucaagaccaacgccaucaccacgauccuggccgcggugacccugugcuucgccagcucccagaacaucaccgaggaguucuaccagagcacgugcuccgccgucagcaagggcuaccucggggcccugcgcaccggcugguacaccuccgugaucaccaucgagcugagcaacaucaaggagaacaagugcaacgggaccgacgccaaggugaagcucaucaagcaggagcuggacaaguacaagaacgcggucacggaccugcagcuccugaugcaguccaccccggccgccggcagcggguccgccaucugcagcggcaucgcggugugcaaggugcugcaccucgagggcgaggucaacaagaucaagaacgcccugcuguccaccaacaaggccguggugagccucuccaacggggucagcgugcugaccuucaaggugcuggaccucaagaacuacaucgacaagcagcugcugcccauccucaacaagcaguccugcagcauccccaacaucgagacggucaucgaguuccagcagaagaacaaccggcugcuggagaucacccgcgaguucuccgugaacgccggcgugaccacccccgucagcacguacaugcucaccaacuccgagcugcugagccucaucaacgacaugccgaucaccaacgaccagaagaagcugaugagcaacaacgugcagaucgugcggcagcaguccuacagcaucaugugcaucaucaaggaggagguccuggccuacguggugcagcucccccuguacggggucaucgacacccccugcuggaagcugcacacgagcccccucugcaccaccaacaccaaggagggcuccaacaucugccugacgcgcaccgaccgggggugguacugcgacaacgcgggcuccgugagcuucuucccgcaggccgagaccugcaaggugcaguccaaccgcgucuucugcgacaccaugaacagccugacgcuccccuccgaggugaaccugugcaacaucgacaucuucaaccccaaguacgacugcaagaucaugaccagcaagaccgacgucuccagcuccgugaucaccagccugggcgccaucguguccugcuacgggaagacgaagugcaccgccagcaacaagaaccggggcaucaucaagaccuucuccaacgggugcgacuacgucagcaacaagggcguggacaccguguccgucggcaacacgcucuacugcgugaacaagcaggaggggcagagccuguacgugaagggcgagcccaucaucaacuucuacgacccgcuggucuuccccagcgacgaguucgacgccuccaucagccaggugaacgagaagaucaaccagucccucgcguucauccgcaagagcgacgagcugcugcacaacgugaacgucgggaaguccaccaccaacaucaugaucaccaccaucaucaucgugaucaucgugauccuccugcugcucaucgccgucggccuguuccuguacugcaaggcccggugaggacuagucccuguucccagagcccacuuuuuuuucuuuuuuugaaauaaaauagccugucuuucagaucucaaaggcucuuuucagagccaccaaaaaaaaaaaaaaaaaaaaaaaaaaaaaaaaaaaaaaaaaaaaaaaaaaaaaaaaaaaaaaaaaaaaaaaaaaaaaaaaaaaaaaaaaaaaaaaaaaaaa

SEQ ID NO: 21516 - RNA, 1817 nt, Artificial Sequence
  mRNA product Design a-1 (hSL-A100) comprising derived and/or modified sequence from HRSV(Memphis-37)__AIY60640.1__F-del_DSCav1_mut2 (opt1)
aggagagucccgcagucggcguccagcggcucugcuuguucgugugugugucguugcaggccuuauucaagcuuaccauggagcugcccauccucaagaccaacgccaucaccacgauccuggccgcggugacccugugcuucgccagcucccagaacaucaccgaggaguucuaccagagcacgugcuccgccgucagcaagggcuaccucggggcccugcgcaccggcugguacaccuccgugaucaccaucgagcugagcaacaucaaggagaacaagugcaacgggaccgacgccaaggugaagcucaucaagcaggagcuggacaaguacaagaacgcggucacggaccugcagcuccugaugcaguccaccccggccgccggcagcggguccgccaucugcagcggcaucgcggugugcaaggugcugcaccucgagggcgaggucaacaagaucaagaacgcccugcuguccaccaacaaggccguggugagccucuccaacggggucagcgugcugaccuucaaggugcuggaccucaagaacuacaucgacaagcagcugcugcccauccucaacaagcaguccugcagcauccccaacaucgagacggucaucgaguuccagcagaagaacaaccggcugcuggagaucacccgcgaguucuccgugaacgccggcgugaccacccccgucagcacguacaugcucaccaacuccgagcugcugagccucaucaacgacaugccgaucaccaacgaccagaagaagcugaugagcaacaacgugcagaucgugcggcagcaguccuacagcaucaugugcaucaucaaggaggagguccuggccuacguggugcagcucccccuguacggggucaucgacacccccugcuggaagcugcacacgagcccccucugcaccaccaacaccaaggagggcuccaacaucugccugacgcgcaccgaccgggggugguacugcgacaacgcgggcuccgugagcuucuucccgcaggccgagaccugcaaggugcaguccaaccgcgucuucugcgacaccaugaacagccugacgcuccccuccgaggugaaccugugcaacaucgacaucuucaaccccaaguacgacugcaagaucaugaccagcaagaccgacgucuccagcuccgugaucaccagccugggcgccaucguguccugcuacgggaagacgaagugcaccgccagcaacaagaaccggggcaucaucaagaccuucuccaacgggugcgacuacgucagcaacaagggcguggacaccguguccgucggcaacacgcucuacugcgugaacaagcaggaggggcagagccuguacgugaagggcgagcccaucaucaacuucuacgacccgcuggucuuccccagcgacgaguucgacgccuccaucagccaggugaacgagaagaucaaccagucccucgcguucauccgcaagagcgacgagcugcugcacaacgugaacgucgggaaguccaccaccaacaucaugaucaccaccaucaucaucgugaucaucgugauccuccugcugcugaucgccgucggccucuuccuguacugcaaggcccggugaggacuagucccuguucccagagcccacuuuuuuuucuuuuuuugaaauaaaauagccugucuuucagaucucaaaggcucuuuucagagccaccaaaaaaaaaaaaaaaaaaaaaaaaaaaaaaaaaaaaaaaaaaaaaaaaaaaaaaaaaaaaaaaaaaaaaaaaaaaaaaaaaaaaaaaaaaaaaaaaaaaaa

SEQ ID NO: 21517 - RNA, 1880 nt, Artificial Sequence
  mRNA product Design a-1 (hSL-A100) comprising derived and/or modified sequence from HRSV(Memphis-37)__AIY60640.1__F_DSCav1_mut3 (opt1)
aggagagucccgcagucggcguccagcggcucugcuuguucgugugugugucguugcaggccuuauucaagcuuaccauggagcugcccauccucaagaccaacgccaucaccacgauccuggccgcggugacccugugcuucgccagcucccagaacaucaccgaggaguucuaccagagcacgugcuccgccgucagcaagggcuaccucggcgcccugcgcaccgggugguacaccagcgugaucaccaucgagcuguccaacaucaaggagaucaagugcaacggcaccgacgccaaggugaagcucaucaagcaggagcuggacaaguacaagaacgcggucacggaccugcagcuccugaugcagagcaccccggccgccggcuccgggagcgcgaucugcuccggcaucgccgucugcaaggugcugcaccucgagggcgaggugaacaagaucaagaacgcccugcuguccaccaacaaggccgucgugagccucuccaacggggugagcguccugaccuucaaggugcuggaccucaagaacuacaucgacaagcagcugcugcccauccugaacaagcagagcugcuccauccccaacaucgagaccgucaucgaguuccagcagaagaacaaccgccuccuggagaucacgcgggaguucagcgugaacgcgggcgugaccacccccgucuccaccuacaugcugacgaacagcgagcuccugucccugaucaacgacaugccgaucaccaacgaccagaagaagcucaugagcaacaacgugcagaucgugcgccagcaguccuacagcaucaugugcaucaucaaggaggagguccuggccuacguggugcagcugccccucuacggggucaucgacacccccugcuggaagcugcacaccagcccccugugcacgaccaacaccaaggagggcuccaacaucugccucacccggacggaccgcgggugguacugcgacaacgccggcagcguguccuucuucccgcaggccgagaccugcaagguccagagcaaccggguguucugcgacaccaugaacucccugacccugcccagcgaggugaaccucugcaacaucgacaucuucaaccccaaguacgacugcaagaucaugacguccaagaccgacgucagcuccagcgugaucaccucccugggcgccaucgugagcugcuacgggaagaccaagugcacggcgagcaacaagaaccgcggcaucaucaagaccuucuccaacgggugcgacuacgucagcaacaagggcguggacaccguguccgucggcaacacccuguacugcgugaacaagcaggagggccagagccucuacgugaagggggagcccaucaucaacuucuacgacccgcuggucuuccccuccgacgaguucgacgccagcaucucccaggugaacgagaagaucaaccagagccuggccuucauccggaaguccgacgagcuccugcacaacgugaacgucggcaagagcaccacgaacaucaugaucaccaccaucaucaucgugaucaucgugauccugcugcuccugaucgccgucgggcuguuccucuacugcaaggcccgcuccacccccgugacgcugagcaaggaccagcuguccgggaucaacaacaucgcguucagcaacugaggacuagucccuguucccagagcccacuuuuuuuucuuuuuuugaaauaaaauagccugucuuucagaucucaaaggcucuuuucagagccaccaaaaaaaaaaaaaaaaaaaaaaaaaaaaaaaaaaaaaaaaaaaaaaaaaaaaaaaaaaaaaaaaaaaaaaaaaaaaaaaaaaaaaaaaaaaaaaaaaaaaa

SEQ ID NO: 21518 - RNA, 1880 nt, Artificial Sequence
  mRNA product Design a-1 (hSL-A100) comprising derived and/or modified sequence from HRSV(Memphis-37)__AIY60640.1__F_DSCav1_mut3 (opt1)
aggagagucccgcagucggcguccagcggcucugcuuguucgugugugugucguugcaggccuuauucaagcuuaccauggagcugcccauccucaagaccaacgccaucaccacgauccuggccgcggugacccugugcuucgccagcucccagaacaucaccgaggaguucuaccagagcacgugcuccgccgucagcaagggcuaccucggggcccugcgcaccggcugguacaccuccgugaucaccaucgagcugagcaacaucaaggagaucaagugcaacgggaccgacgccaaggugaagcucaucaagcaggagcuggacaaguacaagaacgcggucacggaccugcagcuccugaugcaguccaccccggccgccggcagcggguccgccaucugcagcggcaucgcggugugcaaggugcugcaccucgagggcgaggucaacaagaucaagaacgcccugcuguccaccaacaaggccguggugagccucuccaacggggucagcgugcugaccuucaaggugcuggaccucaagaacuacaucgacaagcagcugcugcccauccucaacaagcaguccugcagcauccccaacaucgagacggucaucgaguuccagcagaagaacaaccggcugcuggagaucacccgcgaguucuccgugaacgccggcgugaccacccccgucagcacguacaugcucaccaacuccgagcugcugagccucaucaacgacaugccgaucaccaacgaccagaagaagcugaugagcaacaacgugcagaucgugcggcagcaguccuacagcaucaugugcaucaucaaggaggagguccuggccuacguggugcagcucccccuguacggggucaucgacacccccugcuggaagcugcacacgagcccccucugcaccaccaacaccaaggagggcuccaacaucugccugacgcgcaccgaccgggggugguacugcgacaacgcgggcuccgugagcuucuucccgcaggccgagaccugcaaggugcaguccaaccgcgucuucugcgacaccaugaacagccugacgcuccccuccgaggugaaccugugcaacaucgacaucuucaaccccaaguacgacugcaagaucaugaccagcaagaccgacgucuccagcuccgugaucaccagccugggcgccaucguguccugcuacgggaagacgaagugcaccgccagcaacaagaaccggggcaucaucaagaccuucuccaacgggugcgacuacgucagcaacaagggcguggacaccguguccgucggcaacacgcucuacugcgugaacaagcaggaggggcagagccuguacgugaagggcgagcccaucaucaacuucuacgacccgcuggucuuccccagcgacgaguucgacgccuccaucagccaggugaacgagaagaucaaccagucccucgcguucauccgcaagagcgacgagcugcugcacaacgugaacgucgggaaguccaccaccaacaucaugaucaccaccaucaucaucgugaucaucgugauccuccugcugcucaucgccgucggccuguuccuguacugcaaggcccggagcacgcccgugacccuguccaaggaccagcucagcgggaucaacaacaucgccuucuccaacugaggacuagucccuguucccagagcccacuuuuuuuucuuuuuuugaaauaaaauagccugucuuucagaucucaaaggcucuuuucagagccaccaaaaaaaaaaaaaaaaaaaaaaaaaaaaaaaaaaaaaaaaaaaaaaaaaaaaaaaaaaaaaaaaaaaaaaaaaaaaaaaaaaaaaaaaaaaaaaaaaaaaa

SEQ ID NO: 21519 - RNA, 1880 nt, Artificial Sequence
  mRNA product Design a-1 (hSL-A100) comprising derived and/or modified sequence from HRSV(Memphis-37)__AIY60640.1__F_DSCav1_mut3 (opt1)
aggagagucccgcagucggcguccagcggcucugcuuguucgugugugugucguugcaggccuuauucaagcuuaccauggagcugcccauccucaagaccaacgccaucaccacgauccuggccgcggugacccugugcuucgccagcucccagaacaucaccgaggaguucuaccagagcacgugcuccgccgucagcaagggcuaccucggggcccugcgcaccggcugguacaccuccgugaucaccaucgagcugagcaacaucaaggagaucaagugcaacgggaccgacgccaaggugaagcucaucaagcaggagcuggacaaguacaagaacgcggucacggaccugcagcuccugaugcaguccaccccggccgccggcagcggguccgccaucugcagcggcaucgcggugugcaaggugcugcaccucgagggcgaggucaacaagaucaagaacgcccugcuguccaccaacaaggccguggugagccucuccaacggggucagcgugcugaccuucaaggugcuggaccucaagaacuacaucgacaagcagcugcugcccauccucaacaagcaguccugcagcauccccaacaucgagacggucaucgaguuccagcagaagaacaaccggcugcuggagaucacccgcgaguucuccgugaacgccggcgugaccacccccgucagcacguacaugcucaccaacuccgagcugcugagccucaucaacgacaugccgaucaccaacgaccagaagaagcugaugagcaacaacgugcagaucgugcggcagcaguccuacagcaucaugugcaucaucaaggaggagguccuggccuacguggugcagcucccccuguacggggucaucgacacccccugcuggaagcugcacacgagcccccucugcaccaccaacaccaaggagggcuccaacaucugccugacgcgcaccgaccgggggugguacugcgacaacgcgggcuccgugagcuucuucccgcaggccgagaccugcaaggugcaguccaaccgcgucuucugcgacaccaugaacagccugacgcuccccuccgaggugaaccugugcaacaucgacaucuucaaccccaaguacgacugcaagaucaugaccagcaagaccgacgucuccagcuccgugaucaccagccugggcgccaucguguccugcuacgggaagacgaagugcaccgccagcaacaagaaccggggcaucaucaagaccuucuccaacgggugcgacuacgucagcaacaagggcguggacaccguguccgucggcaacacgcucuacugcgugaacaagcaggaggggcagagccuguacgugaagggcgagcccaucaucaacuucuacgacccgcuggucuuccccagcgacgaguucgacgccuccaucagccaggugaacgagaagaucaaccagucccucgcguucauccgcaagagcgacgagcugcugcacaacgugaacgucgggaaguccaccaccaacaucaugaucaccaccaucaucaucgugaucaucgugauccuccugcugcugaucgccgucggccucuuccuguacugcaaggcccggagcacgcccgugacccuguccaaggaccagcucagcgggaucaacaacaucgccuucuccaacugaggacuagucccuguucccagagcccacuuuuuuuucuuuuuuugaaauaaaauagccugucuuucagaucucaaaggcucuuuucagagccaccaaaaaaaaaaaaaaaaaaaaaaaaaaaaaaaaaaaaaaaaaaaaaaaaaaaaaaaaaaaaaaaaaaaaaaaaaaaaaaaaaaaaaaaaaaaaaaaaaaaaa

SEQ ID NO: 21520 - RNA, 1817 nt, Artificial Sequence
  mRNA product Design a-1 (hSL-A100) comprising derived and/or modified sequence from HRSV(Memphis-37)__AIY60640.1__F-del_DSCav1_mut3 (opt1)
aggagagucccgcagucggcguccagcggcucugcuuguucgugugugugucguugcaggccuuauucaagcuuaccauggagcugcccauccucaagaccaacgccaucaccacgauccuggccgcggugacccugugcuucgccagcucccagaacaucaccgaggaguucuaccagagcacgugcuccgccgucagcaagggcuaccucggcgcccugcgcaccgggugguacaccagcgugaucaccaucgagcuguccaacaucaaggagaucaagugcaacggcaccgacgccaaggugaagcucaucaagcaggagcuggacaaguacaagaacgcggucacggaccugcagcuccugaugcagagcaccccggccgccggcuccgggagcgcgaucugcuccggcaucgccgucugcaaggugcugcaccucgagggcgaggugaacaagaucaagaacgcccugcuguccaccaacaaggccgucgugagccucuccaacggggugagcguccugaccuucaaggugcuggaccucaagaacuacaucgacaagcagcugcugcccauccugaacaagcagagcugcuccauccccaacaucgagaccgucaucgaguuccagcagaagaacaaccgccuccuggagaucacgcgggaguucagcgugaacgcgggcgugaccacccccgucuccaccuacaugcugacgaacagcgagcuccugucccugaucaacgacaugccgaucaccaacgaccagaagaagcucaugagcaacaacgugcagaucgugcgccagcaguccuacagcaucaugugcaucaucaaggaggagguccuggccuacguggugcagcugccccucuacggggucaucgacacccccugcuggaagcugcacaccagcccccugugcacgaccaacaccaaggagggcuccaacaucugccucacccggacggaccgcgggugguacugcgacaacgccggcagcguguccuucuucccgcaggccgagaccugcaagguccagagcaaccggguguucugcgacaccaugaacucccugacccugcccagcgaggugaaccucugcaacaucgacaucuucaaccccaaguacgacugcaagaucaugacguccaagaccgacgucagcuccagcgugaucaccucccugggcgccaucgugagcugcuacgggaagaccaagugcacggcgagcaacaagaaccgcggcaucaucaagaccuucuccaacgggugcgacuacgucagcaacaagggcguggacaccguguccgucggcaacacccuguacugcgugaacaagcaggagggccagagccucuacgugaagggggagcccaucaucaacuucuacgacccgcuggucuuccccuccgacgaguucgacgccagcaucucccaggugaacgagaagaucaaccagagccuggccuucauccggaaguccgacgagcuccugcacaacgugaacgucggcaagagcaccacgaacaucaugaucaccaccaucaucaucgugaucaucgugauccugcugcuccugaucgccgucgggcuguuccucuacugcaaggcccgcugaggacuagucccuguucccagagcccacuuuuuuuucuuuuuuugaaauaaaauagccugucuuucagaucucaaaggcucuuuucagagccaccaaaaaaaaaaaaaaaaaaaaaaaaaaaaaaaaaaaaaaaaaaaaaaaaaaaaaaaaaaaaaaaaaaaaaaaaaaaaaaaaaaaaaaaaaaaaaaaaaaaaa

SEQ ID NO: 21521 - RNA, 1817 nt, Artificial Sequence
  mRNA product Design a-1 (hSL-A100) comprising derived and/or modified sequence from HRSV(Memphis-37)__AIY60640.1__F-del_DSCav1_mut3 (opt1)
aggagagucccgcagucggcguccagcggcucugcuuguucgugugugugucguugcaggccuuauucaagcuuaccauggagcugcccauccucaagaccaacgccaucaccacgauccuggccgcggugacccugugcuucgccagcucccagaacaucaccgaggaguucuaccagagcacgugcuccgccgucagcaagggcuaccucggggcccugcgcaccggcugguacaccuccgugaucaccaucgagcugagcaacaucaaggagaucaagugcaacgggaccgacgccaaggugaagcucaucaagcaggagcuggacaaguacaagaacgcggucacggaccugcagcuccugaugcaguccaccccggccgccggcagcggguccgccaucugcagcggcaucgcggugugcaaggugcugcaccucgagggcgaggucaacaagaucaagaacgcccugcuguccaccaacaaggccguggugagccucuccaacggggucagcgugcugaccuucaaggugcuggaccucaagaacuacaucgacaagcagcugcugcccauccucaacaagcaguccugcagcauccccaacaucgagacggucaucgaguuccagcagaagaacaaccggcugcuggagaucacccgcgaguucuccgugaacgccggcgugaccacccccgucagcacguacaugcucaccaacuccgagcugcugagccucaucaacgacaugccgaucaccaacgaccagaagaagcugaugagcaacaacgugcagaucgugcggcagcaguccuacagcaucaugugcaucaucaaggaggagguccuggccuacguggugcagcucccccuguacggggucaucgacacccccugcuggaagcugcacacgagcccccucugcaccaccaacaccaaggagggcuccaacaucugccugacgcgcaccgaccgggggugguacugcgacaacgcgggcuccgugagcuucuucccgcaggccgagaccugcaaggugcaguccaaccgcgucuucugcgacaccaugaacagccugacgcuccccuccgaggugaaccugugcaacaucgacaucuucaaccccaaguacgacugcaagaucaugaccagcaagaccgacgucuccagcuccgugaucaccagccugggcgccaucguguccugcuacgggaagacgaagugcaccgccagcaacaagaaccggggcaucaucaagaccuucuccaacgggugcgacuacgucagcaacaagggcguggacaccguguccgucggcaacacgcucuacugcgugaacaagcaggaggggcagagccuguacgugaagggcgagcccaucaucaacuucuacgacccgcuggucuuccccagcgacgaguucgacgccuccaucagccaggugaacgagaagaucaaccagucccucgcguucauccgcaagagcgacgagcugcugcacaacgugaacgucgggaaguccaccaccaacaucaugaucaccaccaucaucaucgugaucaucgugauccuccugcugcucaucgccgucggccuguuccuguacugcaaggcccggugaggacuagucccuguucccagagcccacuuuuuuuucuuuuuuugaaauaaaauagccugucuuucagaucucaaaggcucuuuucagagccaccaaaaaaaaaaaaaaaaaaaaaaaaaaaaaaaaaaaaaaaaaaaaaaaaaaaaaaaaaaaaaaaaaaaaaaaaaaaaaaaaaaaaaaaaaaaaaaaaaaaaa

SEQ ID NO: 21522 - RNA, 1817 nt, Artificial Sequence
  mRNA product Design a-1 (hSL-A100) comprising derived and/or modified sequence from HRSV(Memphis-37)__AIY60640.1__F-del_DSCav1_mut3 (opt1)
aggagagucccgcagucggcguccagcggcucugcuuguucgugugugugucguugcaggccuuauucaagcuuaccauggagcugcccauccucaagaccaacgccaucaccacgauccuggccgcggugacccugugcuucgccagcucccagaacaucaccgaggaguucuaccagagcacgugcuccgccgucagcaagggcuaccucggggcccugcgcaccggcugguacaccuccgugaucaccaucgagcugagcaacaucaaggagaucaagugcaacgggaccgacgccaaggugaagcucaucaagcaggagcuggacaaguacaagaacgcggucacggaccugcagcuccugaugcaguccaccccggccgccggcagcggguccgccaucugcagcggcaucgcggugugcaaggugcugcaccucgagggcgaggucaacaagaucaagaacgcccugcuguccaccaacaaggccguggugagccucuccaacggggucagcgugcugaccuucaaggugcuggaccucaagaacuacaucgacaagcagcugcugcccauccucaacaagcaguccugcagcauccccaacaucgagacggucaucgaguuccagcagaagaacaaccggcugcuggagaucacccgcgaguucuccgugaacgccggcgugaccacccccgucagcacguacaugcucaccaacuccgagcugcugagccucaucaacgacaugccgaucaccaacgaccagaagaagcugaugagcaacaacgugcagaucgugcggcagcaguccuacagcaucaugugcaucaucaaggaggagguccuggccuacguggugcagcucccccuguacggggucaucgacacccccugcuggaagcugcacacgagcccccucugcaccaccaacaccaaggagggcuccaacaucugccugacgcgcaccgaccgggggugguacugcgacaacgcgggcuccgugagcuucuucccgcaggccgagaccugcaaggugcaguccaaccgcgucuucugcgacaccaugaacagccugacgcuccccuccgaggugaaccugugcaacaucgacaucuucaaccccaaguacgacugcaagaucaugaccagcaagaccgacgucuccagcuccgugaucaccagccugggcgccaucguguccugcuacgggaagacgaagugcaccgccagcaacaagaaccggggcaucaucaagaccuucuccaacgggugcgacuacgucagcaacaagggcguggacaccguguccgucggcaacacgcucuacugcgugaacaagcaggaggggcagagccuguacgugaagggcgagcccaucaucaacuucuacgacccgcuggucuuccccagcgacgaguucgacgccuccaucagccaggugaacgagaagaucaaccagucccucgcguucauccgcaagagcgacgagcugcugcacaacgugaacgucgggaaguccaccaccaacaucaugaucaccaccaucaucaucgugaucaucgugauccuccugcugcugaucgccgucggccucuuccuguacugcaaggcccggugaggacuagucccuguucccagagcccacuuuuuuuucuuuuuuugaaauaaaauagccugucuuucagaucucaaaggcucuuuucagagccaccaaaaaaaaaaaaaaaaaaaaaaaaaaaaaaaaaaaaaaaaaaaaaaaaaaaaaaaaaaaaaaaaaaaaaaaaaaaaaaaaaaaaaaaaaaaaaaaaaaaaa

SEQ ID NO: 21523 - RNA, 1880 nt, Artificial Sequence
  mRNA product Design a-1 (hSL-A100) comprising derived and/or modified sequence from HRSV(Memphis-37)__AIY60640.1__F_DSCav1_mut4 (opt1)
aggagagucccgcagucggcguccagcggcucugcuuguucgugugugugucguugcaggccuuauucaagcuuaccauggagcugcccauccucaagaccaacgccaucaccacgauccuggccgcggugacccugugcuucgccagcucccagaacaucaccgaggaguucuaccagagcacgugcuccgccgucagcaagggcuaccucuccgcccugcgcaccgggugguacaccagcgugaucaccaucgagcuguccaacaucaaggagaacaagugcaacggcaccgacgccaaggugaagcucaucaagcaggagcuggacaaguacaagaacgcggucacggagcugcagcuccugaugcagagcaccccggccgccggcuccgggagcgcgaucugcuccggcaucgccgucugcaaggugcugcaccucgagggcgaggugaacaagaucaagaacgcccugcuguccaccaacaaggccgucgugagccucuccaacggggugagcguccugaccuucaaggugcuggaccucaagaacuacaucgacaagcagcugcugcccauccugaacaagcagagcugcuccaucagcaacaucgagaccgucaucgaguuccagcagaagaacaaccgccuccuggagaucacgcgggaguucagcgugaacgcgggcgugaccacccccgucuccaccuacaugcugacgaacagcgagcuccugucccugaucaacgacaugccgaucaccaacgaccagaagaagcucaugagcaacaacgugcagaucgugcgccagcaguccuacagcaucaugugcaucaucaaggaggagguccuggccuacguggugcagcugccccucuacggggucaucgacacccccugcuggaagcugcacaccagcccccugugcacgaccaacaccaaggagggcuccaacaucugccucacccggacggaccgcgggugguacugcgacaacgccggcagcguguccuucuucccgcaggccgagaccugcaagguccagagcaaccggguguucugcgacaccaugaacucccggacccugcccagcgaggugaaccucugcaacaucgacaucuucaaccccaaguacgacugcaagaucaugacguccaagaccgacgucagcuccagcgugaucaccucccugggcgccaucgugagcugcuacgggaagaccaagugcacggcgagcaacaagaaccgcggcaucaucaagaccuucuccaacgggugcgacuacgucagcaacaagggcguggacaccguguccgucggcaacacccuguacugcgugaacaagcaggagggcaagagccucuacgugaagggggagcccaucaucaacuucuacgacccgcuggucuuccccuccgacgaguucgacgccagcaucucccaggugaacgagaagaucaaccagagccuggccuucauccggaaguccgacgagcuccugcacaacgugaacgucggcaagagcaccacgaacaucaugaucaccaccaucaucaucgugaucaucgugauccugcugcuccugaucgccgucgggcuguuccucuacugcaaggcccgcuccacccccgugacgcugagcaaggaccagcuguccgggaucaacaacaucgcguucagcaacugaggacuagucccuguucccagagcccacuuuuuuuucuuuuuuugaaauaaaauagccugucuuucagaucucaaaggcucuuuucagagccaccaaaaaaaaaaaaaaaaaaaaaaaaaaaaaaaaaaaaaaaaaaaaaaaaaaaaaaaaaaaaaaaaaaaaaaaaaaaaaaaaaaaaaaaaaaaaaaaaaaaaa

SEQ ID NO: 21524 - RNA, 1880 nt, Artificial Sequence
  mRNA product Design a-1 (hSL-A100) comprising derived and/or modified sequence from HRSV(Memphis-37)__AIY60640.1__F_DSCav1_mut4 (opt1)
aggagagucccgcagucggcguccagcggcucugcuuguucgugugugugucguugcaggccuuauucaagcuuaccauggagcugcccauccucaagaccaacgccaucaccacgauccuggccgcggugacccugugcuucgccagcucccagaacaucaccgaggaguucuaccagagcacgugcuccgccgucagcaagggcuaccucuccgcccugcgcaccgggugguacaccagcgugaucaccaucgagcuguccaacaucaaggagaacaagugcaacggcaccgacgccaaggugaagcucaucaagcaggagcuggacaaguacaagaacgcggucacggagcugcagcuccugaugcagagcaccccggccgccggguccggcagcgccaucugcuccgggaucgcggugugcaaggugcugcaccucgagggcgaggucaacaagaucaagaacgcccugcugagcaccaacaaggccguggugucccucagcaacggcgucuccgugcugaccuucaaggugcuggaccucaagaacuacaucgacaagcagcugcugcccauccucaacaagcagagcugcuccaucagcaacaucgagacggucaucgaguuccagcagaagaacaaccggcugcuggagaucacccgcgaguucuccgugaacgccggggugaccacccccgucagcacguacaugcucaccaacagcgagcugcugucccucaucaacgacaugcccaucaccaacgaccagaagaagcugaugagcaacaacgugcagaucgugcggcagcaguccuacagcaucaugugcaucaucaaggaggagguccuggccuacguggugcagcucccgcuguacggcgucaucgacacccccugcuggaagcugcacacgagcccccucugcaccaccaacaccaaggagggguccaacaucugccugacgcgcaccgaccggggcugguacugcgacaacgcgggguccgugagcuucuucccccaggccgagaccugcaaggugcaguccaaccgcgucuucugcgacaccaugaacagccggacgcucccguccgaggugaaccugugcaacaucgacaucuucaaccccaaguacgacugcaagaucaugaccagcaagaccgacgucuccagcuccgugaucaccagccugggcgccaucguguccugcuacggcaagacgaagugcaccgccagcaacaagaaccgggggaucaucaagaccuucuccaacggcugcgacuacgucagcaacaaggggguggacaccgugagcgucggcaacacgcucuacugcgugaacaagcaggagggcaagucccuguacgugaagggggagcccaucaucaacuucuacgacccccuggucuucccgagcgacgaguucgacgccuccaucagccaggugaacgagaagaucaaccagucccucgcguucauccgcaagagcgacgagcugcugcacaacgugaacgucggcaaguccaccaccaacaucaugaucaccaccaucaucaucgugaucaucgugauccuccugcugcucaucgccgucgggcuguuccuguacugcaaggcccggagcacgcccgugacccuguccaaggaccagcucagcggcaucaacaacaucgccuucuccaacugaggacuagucccuguucccagagcccacuuuuuuuucuuuuuuugaaauaaaauagccugucuuucagaucucaaaggcucuuuucagagccaccaaaaaaaaaaaaaaaaaaaaaaaaaaaaaaaaaaaaaaaaaaaaaaaaaaaaaaaaaaaaaaaaaaaaaaaaaaaaaaaaaaaaaaaaaaaaaaaaaaaaa

SEQ ID NO: 21525 - RNA, 1880 nt, Artificial Sequence
  mRNA product Design a-1 (hSL-A100) comprising derived and/or modified sequence from HRSV(Memphis-37)__AIY60640.1__F_DSCav1_mut4 (opt1)
aggagagucccgcagucggcguccagcggcucugcuuguucgugugugugucguugcaggccuuauucaagcuuaccauggagcugcccauccucaagaccaacgccaucaccacgauccuggccgcggugacccugugcuucgccagcucccagaacaucaccgaggaguucuaccagagcacgugcuccgccgucagcaagggcuaccucuccgcccugcgcaccgggugguacaccagcgugaucaccaucgagcuguccaacaucaaggagaacaagugcaacggcaccgacgccaaggugaagcucaucaagcaggagcuggacaaguacaagaacgcggucacggagcugcagcuccugaugcagagcaccccggccgccggguccggcagcgccaucugcuccgggaucgcggugugcaaggugcugcaccucgagggcgaggucaacaagaucaagaacgcccugcugagcaccaacaaggccguggugucccucagcaacggcgucuccgugcugaccuucaaggugcuggaccucaagaacuacaucgacaagcagcugcugcccauccucaacaagcagagcugcuccaucagcaacaucgagacggucaucgaguuccagcagaagaacaaccggcugcuggagaucacccgcgaguucuccgugaacgccggggugaccacccccgucagcacguacaugcucaccaacagcgagcugcugucccucaucaacgacaugcccaucaccaacgaccagaagaagcugaugagcaacaacgugcagaucgugcggcagcaguccuacagcaucaugugcaucaucaaggaggagguccuggccuacguggugcagcucccgcuguacggcgucaucgacacccccugcuggaagcugcacacgagcccccucugcaccaccaacaccaaggaggggagcaacaucugccugacgcgcaccgaccggggcugguacugcgacaacgcgggguccgugagcuucuucccccaggccgagaccugcaaggugcaguccaaccgcgucuucugcgacaccaugaacagccggacgcugccguccgaggugaaccucugcaacaucgacaucuucaaccccaaguacgacugcaagaucaugaccagcaagaccgacgucuccagcuccgugaucaccagccugggcgccaucguguccugcuacggcaagacgaagugcaccgccagcaacaagaaccgcgggaucaucaagaccuucuccaacggcugcgacuacgucagcaacaaggggguggacaccgugagcgucggcaacacgcuguacugcgugaacaagcaggagggcaagucccucuacgugaagggggagcccaucaucaacuucuacgacccccuggucuucccgagcgacgaguucgacgccuccaucagccaggugaacgagaagaucaaccagucccuggcguucauccggaaguccgacgagcuccugcacaacgugaacgucggcaaguccaccaccaacaucaugaucaccaccaucaucaucgugaucaucgugauccugcuccugcugaucgccgucgggcuguuccucuacugcaaggcccgcagcacgcccgugacccuguccaaggaccagcugagcggcaucaacaacaucgccuucuccaacugaggacuagucccuguucccagagcccacuuuuuuuucuuuuuuugaaauaaaauagccugucuuucagaucucaaaggcucuuuucagagccaccaaaaaaaaaaaaaaaaaaaaaaaaaaaaaaaaaaaaaaaaaaaaaaaaaaaaaaaaaaaaaaaaaaaaaaaaaaaaaaaaaaaaaaaaaaaaaaaaaaaaa

SEQ ID NO: 21526 - RNA, 1817 nt, Artificial Sequence
  mRNA product Design a-1 (hSL-A100) comprising derived and/or modified sequence from HRSV(Memphis-37)__AIY60640.1__F-del_DSCav1_mut4 (opt1)
aggagagucccgcagucggcguccagcggcucugcuuguucgugugugugucguugcaggccuuauucaagcuuaccauggagcugcccauccucaagaccaacgccaucaccacgauccuggccgcggugacccugugcuucgccagcucccagaacaucaccgaggaguucuaccagagcacgugcuccgccgucagcaagggcuaccucuccgcccugcgcaccgggugguacaccagcgugaucaccaucgagcuguccaacaucaaggagaacaagugcaacggcaccgacgccaaggugaagcucaucaagcaggagcuggacaaguacaagaacgcggucacggagcugcagcuccugaugcagagcaccccggccgccggcuccgggagcgcgaucugcuccggcaucgccgucugcaaggugcugcaccucgagggcgaggugaacaagaucaagaacgcccugcuguccaccaacaaggccgucgugagccucuccaacggggugagcguccugaccuucaaggugcuggaccucaagaacuacaucgacaagcagcugcugcccauccugaacaagcagagcugcuccaucagcaacaucgagaccgucaucgaguuccagcagaagaacaaccgccuccuggagaucacgcgggaguucagcgugaacgcgggcgugaccacccccgucuccaccuacaugcugacgaacagcgagcuccugucccugaucaacgacaugccgaucaccaacgaccagaagaagcucaugagcaacaacgugcagaucgugcgccagcaguccuacagcaucaugugcaucaucaaggaggagguccuggccuacguggugcagcugccccucuacggggucaucgacacccccugcuggaagcugcacaccagcccccugugcacgaccaacaccaaggagggcuccaacaucugccucacccggacggaccgcgggugguacugcgacaacgccggcagcguguccuucuucccgcaggccgagaccugcaagguccagagcaaccggguguucugcgacaccaugaacucccggacccugcccagcgaggugaaccucugcaacaucgacaucuucaaccccaaguacgacugcaagaucaugacguccaagaccgacgucagcuccagcgugaucaccucccugggcgccaucgugagcugcuacgggaagaccaagugcacggcgagcaacaagaaccgcggcaucaucaagaccuucuccaacgggugcgacuacgucagcaacaagggcguggacaccguguccgucggcaacacccuguacugcgugaacaagcaggagggcaagagccucuacgugaagggggagcccaucaucaacuucuacgacccgcuggucuuccccuccgacgaguucgacgccagcaucucccaggugaacgagaagaucaaccagagccuggccuucauccggaaguccgacgagcuccugcacaacgugaacgucggcaagagcaccacgaacaucaugaucaccaccaucaucaucgugaucaucgugauccugcugcuccugaucgccgucgggcuguuccucuacugcaaggcccgcugaggacuagucccuguucccagagcccacuuuuuuuucuuuuuuugaaauaaaauagccugucuuucagaucucaaaggcucuuuucagagccaccaaaaaaaaaaaaaaaaaaaaaaaaaaaaaaaaaaaaaaaaaaaaaaaaaaaaaaaaaaaaaaaaaaaaaaaaaaaaaaaaaaaaaaaaaaaaaaaaaaaaa

SEQ ID NO: 21527 - RNA, 1817 nt, Artificial Sequence
  mRNA product Design a-1 (hSL-A100) comprising derived and/or modified sequence from HRSV(Memphis-37)__AIY60640.1__F-del_DSCav1_mut4 (opt1)
aggagagucccgcagucggcguccagcggcucugcuuguucgugugugugucguugcaggccuuauucaagcuuaccauggagcugcccauccucaagaccaacgccaucaccacgauccuggccgcggugacccugugcuucgccagcucccagaacaucaccgaggaguucuaccagagcacgugcuccgccgucagcaagggcuaccucuccgcccugcgcaccgggugguacaccagcgugaucaccaucgagcuguccaacaucaaggagaacaagugcaacggcaccgacgccaaggugaagcucaucaagcaggagcuggacaaguacaagaacgcggucacggagcugcagcuccugaugcagagcaccccggccgccggguccggcagcgccaucugcuccgggaucgcggugugcaaggugcugcaccucgagggcgaggucaacaagaucaagaacgcccugcugagcaccaacaaggccguggugucccucagcaacggcgucuccgugcugaccuucaaggugcuggaccucaagaacuacaucgacaagcagcugcugcccauccucaacaagcagagcugcuccaucagcaacaucgagacggucaucgaguuccagcagaagaacaaccggcugcuggagaucacccgcgaguucuccgugaacgccggggugaccacccccgucagcacguacaugcucaccaacagcgagcugcugucccucaucaacgacaugcccaucaccaacgaccagaagaagcugaugagcaacaacgugcagaucgugcggcagcaguccuacagcaucaugugcaucaucaaggaggagguccuggccuacguggugcagcucccgcuguacggcgucaucgacacccccugcuggaagcugcacacgagcccccucugcaccaccaacaccaaggagggguccaacaucugccugacgcgcaccgaccggggcugguacugcgacaacgcgggguccgugagcuucuucccccaggccgagaccugcaaggugcaguccaaccgcgucuucugcgacaccaugaacagccggacgcucccguccgaggugaaccugugcaacaucgacaucuucaaccccaaguacgacugcaagaucaugaccagcaagaccgacgucuccagcuccgugaucaccagccugggcgccaucguguccugcuacggcaagacgaagugcaccgccagcaacaagaaccgggggaucaucaagaccuucuccaacggcugcgacuacgucagcaacaaggggguggacaccgugagcgucggcaacacgcucuacugcgugaacaagcaggagggcaagucccuguacgugaagggggagcccaucaucaacuucuacgacccccuggucuucccgagcgacgaguucgacgccuccaucagccaggugaacgagaagaucaaccagucccucgcguucauccgcaagagcgacgagcugcugcacaacgugaacgucggcaaguccaccaccaacaucaugaucaccaccaucaucaucgugaucaucgugauccuccugcugcucaucgccgucgggcuguuccuguacugcaaggcccggugaggacuagucccuguucccagagcccacuuuuuuuucuuuuuuugaaauaaaauagccugucuuucagaucucaaaggcucuuuucagagccaccaaaaaaaaaaaaaaaaaaaaaaaaaaaaaaaaaaaaaaaaaaaaaaaaaaaaaaaaaaaaaaaaaaaaaaaaaaaaaaaaaaaaaaaaaaaaaaaaaaaaa

SEQ ID NO: 21528 - RNA, 1817 nt, Artificial Sequence
  mRNA product Design a-1 (hSL-A100) comprising derived and/or modified sequence from HRSV(Memphis-37)__AIY60640.1__F-del_DSCav1_mut4 (opt1)
aggagagucccgcagucggcguccagcggcucugcuuguucgugugugugucguugcaggccuuauucaagcuuaccauggagcugcccauccucaagaccaacgccaucaccacgauccuggccgcggugacccugugcuucgccagcucccagaacaucaccgaggaguucuaccagagcacgugcuccgccgucagcaagggcuaccucuccgcccugcgcaccgggugguacaccagcgugaucaccaucgagcuguccaacaucaaggagaacaagugcaacggcaccgacgccaaggugaagcucaucaagcaggagcuggacaaguacaagaacgcggucacggagcugcagcuccugaugcagagcaccccggccgccggguccggcagcgccaucugcuccgggaucgcggugugcaaggugcugcaccucgagggcgaggucaacaagaucaagaacgcccugcugagcaccaacaaggccguggugucccucagcaacggcgucuccgugcugaccuucaaggugcuggaccucaagaacuacaucgacaagcagcugcugcccauccucaacaagcagagcugcuccaucagcaacaucgagacggucaucgaguuccagcagaagaacaaccggcugcuggagaucacccgcgaguucuccgugaacgccggggugaccacccccgucagcacguacaugcucaccaacagcgagcugcugucccucaucaacgacaugcccaucaccaacgaccagaagaagcugaugagcaacaacgugcagaucgugcggcagcaguccuacagcaucaugugcaucaucaaggaggagguccuggccuacguggugcagcucccgcuguacggcgucaucgacacccccugcuggaagcugcacacgagcccccucugcaccaccaacaccaaggaggggagcaacaucugccugacgcgcaccgaccggggcugguacugcgacaacgcgggguccgugagcuucuucccccaggccgagaccugcaaggugcaguccaaccgcgucuucugcgacaccaugaacagccggacgcugccguccgaggugaaccucugcaacaucgacaucuucaaccccaaguacgacugcaagaucaugaccagcaagaccgacgucuccagcuccgugaucaccagccugggcgccaucguguccugcuacggcaagacgaagugcaccgccagcaacaagaaccgcgggaucaucaagaccuucuccaacggcugcgacuacgucagcaacaaggggguggacaccgugagcgucggcaacacgcuguacugcgugaacaagcaggagggcaagucccucuacgugaagggggagcccaucaucaacuucuacgacccccuggucuucccgagcgacgaguucgacgccuccaucagccaggugaacgagaagaucaaccagucccuggcguucauccggaaguccgacgagcuccugcacaacgugaacgucggcaaguccaccaccaacaucaugaucaccaccaucaucaucgugaucaucgugauccugcuccugcugaucgccgucgggcuguuccucuacugcaaggcccgcugaggacuagucccuguucccagagcccacuuuuuuuucuuuuuuugaaauaaaauagccugucuuucagaucucaaaggcucuuuucagagccaccaaaaaaaaaaaaaaaaaaaaaaaaaaaaaaaaaaaaaaaaaaaaaaaaaaaaaaaaaaaaaaaaaaaaaaaaaaaaaaaaaaaaaaaaaaaaaaaaaaaaa

SEQ ID NO: 21529 - RNA, 1883 nt, Artificial Sequence
  mRNA product Design a-1 (hSL-A100) comprising derived and/or modified sequence from HRSV(Memphis-37)__AIY60640.1__F_DSCav1_mut5 (opt1)
aggagagucccgcagucggcguccagcggcucugcuuguucgugugugugucguugcaggccuuauucaagcuuaccauggagcugcccauccucaagaccaacgccaucaccacgauccuggccgcggugacccugugcuucgccagcucccagaacaucaccgaggaguucuaccagagcacgugcuccgccgucagcaagggcuaccucuccgcccugcgcaccgggugguacaccagcgugaucaccaucgagcuguccaacaucaaggagaacaagugcaacggcaccgacgccaaggugaagcucaucaagcaggagcuggacaaguacaagaacgcggucacggagcugcagcuccugaugcagagcaccccggccgccggcuccgggagcgcgaucgccuccggcaucgccgucugcaaggugcugcaccucgagggcgaggugaacaagaucaagaacgcccugcuguccaccaacaaggccgucgugagccucuccggcugcggggugagcguccugaccuucaaggugcuggaccucaagaacuacaucgacaagcagcugcugcccauccugaacaagcagagcugcuccaucagcaacaucgagaccgucaucgaguuccagcagaagaacaaccgccuccuggagaucacgcgggaguucagcgugaacgcgggcgugaccacccccgucuccaccuacaugcugacgaacagcgagcuccugucccugaucaacgacaugccgaucaccaacgaccagaagaagcucaugagcaacaacgugcagaucgugcgccagcaguccuacagcaucaugugcaucaucaaggaggagguccuggccuacguggugcagcugccccucuacggggucaucgacacccccugcuggaagcugcacaccagcccccugugcacgaccaacaccaaggagggcuccaacaucugccucacccggacggaccgcgggugguacugcgacaacgccggcagcguguccuucuucccgcaggccgagaccugcaagguccagagcaaccggguguucugcgacaccaugaacucccggacccugcccagcgaggugaaccucugcaacaucgacaucuucaaccccaaguacgacugcaagaucaugacguccaagaccgacgucagcuccagcgugaucaccucccugggcgccaucgugagcugcuacgggaagaccaagugcacggcgagcaacaagugccgcggcaucaucaagaccuucuccaacgggugcgacuacgucagcaacaagggcguggacaccguguccgucggcaacacccuguacuacgugaacaagcaggagggcaagagccucuacgugaagggggagcccaucaucaacuucuacgacccgcuggucuuccccuccgacgaguucgacgccagcaucucccaggugaacgagaagaucaaccagagccuggccuucauccggaaguccgacgagcuccugcacaacgugaacgucggcaagagcaccacgaacaucaugaucaccaccaucaucaucgugaucaucgugauccugcugcuccugaucgccgucgggcuguuccucuacugcaaggcccgcuccacccccgugacgcugagcaaggaccagcuguccgggaucaacaacaucgcguucagcaacugaggacuagucccuguucccagagcccacuuuuuuuucuuuuuuugaaauaaaauagccugucuuucagaucucaaaggcucuuuucagagccaccaaaaaaaaaaaaaaaaaaaaaaaaaaaaaaaaaaaaaaaaaaaaaaaaaaaaaaaaaaaaaaaaaaaaaaaaaaaaaaaaaaaaaaaaaaaaaaaaaaaaa

SEQ ID NO: 21530 - RNA, 1883 nt, Artificial Sequence
  mRNA product Design a-1 (hSL-A100) comprising derived and/or modified sequence from HRSV(Memphis-37)__AIY60640.1__F_DSCav1_mut5 (opt1)
aggagagucccgcagucggcguccagcggcucugcuuguucgugugugugucguugcaggccuuauucaagcuuaccauggagcugcccauccucaagaccaacgccaucaccacgauccuggccgcggugacccugugcuucgccagcucccagaacaucaccgaggaguucuaccagagcacgugcuccgccgucagcaagggcuaccucuccgcccugcgcaccgggugguacaccagcgugaucaccaucgagcuguccaacaucaaggagaacaagugcaacggcaccgacgccaaggugaagcucaucaagcaggagcuggacaaguacaagaacgcggucacggagcugcagcuccugaugcagagcaccccggccgccggguccggcagcgccaucgcguccgggaucgccgugugcaaggugcugcaccucgagggcgaggucaacaagaucaagaacgcccugcugagcaccaacaaggccguggugucccucagcggcugcggggucuccgugcugaccuucaaggugcuggaccucaagaacuacaucgacaagcagcugcugcccauccucaacaagcagagcugcuccaucagcaacaucgagacggucaucgaguuccagcagaagaacaaccggcugcuggagaucacccgcgaguucuccgugaacgccggcgugaccacccccgucagcacguacaugcucaccaacagcgagcugcugucccucaucaacgacaugcccaucaccaacgaccagaagaagcugaugagcaacaacgugcagaucgugcggcagcaguccuacagcaucaugugcaucaucaaggaggagguccuggcguacguggugcagcucccgcuguacggggucaucgacacccccugcuggaagcugcacacgagcccccucugcaccaccaacaccaaggagggcuccaacaucugccugacgcgcaccgaccgggggugguacugcgacaacgccggcuccgugagcuucuucccccaggccgagaccugcaaggugcaguccaaccgcgucuucugcgacaccaugaacagccggacgcucccguccgaggugaaccugugcaacaucgacaucuucaaccccaaguacgacugcaagaucaugaccagcaagaccgacgucuccagcuccgugaucaccagccugggcgccaucguguccugcuacgggaagacgaagugcaccgccagcaacaagugccggggcaucaucaagaccuucuccaacgggugcgacuacgucagcaacaagggcguggacaccgugagcgucggcaacacgcucuacuacgugaacaagcaggaggggaagucccuguacgugaagggcgagcccaucaucaacuucuacgacccccuggucuucccgagcgacgaguucgacgcguccaucagccaggugaacgagaagaucaaccagucccucgccuucauccgcaagagcgacgagcugcugcacaacgugaacgucgggaaguccaccaccaacaucaugaucaccaccaucaucaucgugaucaucgugauccuccugcugcucaucgccgucggccuguuccuguacugcaaggcccggagcacgcccgugacccuguccaaggaccagcucagcgggaucaacaacaucgccuucuccaacugaggacuagucccuguucccagagcccacuuuuuuuucuuuuuuugaaauaaaauagccugucuuucagaucucaaaggcucuuuucagagccaccaaaaaaaaaaaaaaaaaaaaaaaaaaaaaaaaaaaaaaaaaaaaaaaaaaaaaaaaaaaaaaaaaaaaaaaaaaaaaaaaaaaaaaaaaaaaaaaaaaaaa

SEQ ID NO: 21531 - RNA, 1883 nt, Artificial Sequence
  mRNA product Design a-1 (hSL-A100) comprising derived and/or modified sequence from HRSV(Memphis-37)__AIY60640.1__F_DSCav1_mut5 (opt1)
aggagagucccgcagucggcguccagcggcucugcuuguucgugugugugucguugcaggccuuauucaagcuuaccauggagcugcccauccucaagaccaacgccaucaccacgauccuggccgcggugacccugugcuucgccagcucccagaacaucaccgaggaguucuaccagagcacgugcuccgccgucagcaagggcuaccucuccgcccugcgcaccgggugguacaccagcgugaucaccaucgagcuguccaacaucaaggagaacaagugcaacggcaccgacgccaaggugaagcucaucaagcaggagcuggacaaguacaagaacgcggucacggagcugcagcuccugaugcagagcaccccggccgccggguccggcagcgccaucgcguccgggaucgccgugugcaaggugcugcaccucgagggcgaggucaacaagaucaagaacgcccugcugagcaccaacaaggccguggugucccucagcggcugcggggucuccgugcugaccuucaaggugcuggaccucaagaacuacaucgacaagcagcugcugcccauccucaacaagcagagcugcuccaucagcaacaucgagacggucaucgaguuccagcagaagaacaaccggcugcuggagaucacccgcgaguucuccgugaacgccggcgugaccacccccgucagcacguacaugcucaccaacagcgagcugcugucccucaucaacgacaugcccaucaccaacgaccagaagaagcugaugagcaacaacgugcagaucgugcggcagcaguccuacagcaucaugugcaucaucaaggaggagguccuggcguacguggugcagcucccgcuguacggggucaucgacacccccugcuggaagcugcacacgagcccccucugcaccaccaacaccaaggagggcagcaacaucugccugacgcgcaccgaccgggggugguacugcgacaacgccggcuccgugagcuucuucccccaggccgagaccugcaaggugcaguccaaccgcgucuucugcgacaccaugaacagccggacgcugccguccgaggugaaccucugcaacaucgacaucuucaaccccaaguacgacugcaagaucaugaccagcaagaccgacgucuccagcuccgugaucaccagccugggcgccaucguguccugcuacgggaagacgaagugcaccgccagcaacaagugccgcggcaucaucaagaccuucuccaacgggugcgacuacgucagcaacaagggcguggacaccgugagcgucggcaacacgcuguacuacgugaacaagcaggaggggaagucccucuacgugaagggcgagcccaucaucaacuucuacgacccccuggucuucccgagcgacgaguucgacgcguccaucagccaggugaacgagaagaucaaccagucccuggccuucauccggaaguccgacgagcuccugcacaacgugaacgucgggaaguccaccaccaacaucaugaucaccaccaucaucaucgugaucaucgugauccugcuccugcugaucgccgucggccuguuccucuacugcaaggcccgcagcacgcccgugacccuguccaaggaccagcugagcgggaucaacaacaucgccuucuccaacugaggacuagucccuguucccagagcccacuuuuuuuucuuuuuuugaaauaaaauagccugucuuucagaucucaaaggcucuuuucagagccaccaaaaaaaaaaaaaaaaaaaaaaaaaaaaaaaaaaaaaaaaaaaaaaaaaaaaaaaaaaaaaaaaaaaaaaaaaaaaaaaaaaaaaaaaaaaaaaaaaaaaa

SEQ ID NO: 21532 - RNA, 1820 nt, Artificial Sequence
  mRNA product Design a-1 (hSL-A100) comprising derived and/or modified sequence from HRSV(Memphis-37)__AIY60640.1__F-del_DSCav1_mut5 (opt1)
aggagagucccgcagucggcguccagcggcucugcuuguucgugugugugucguugcaggccuuauucaagcuuaccauggagcugcccauccucaagaccaacgccaucaccacgauccuggccgcggugacccugugcuucgccagcucccagaacaucaccgaggaguucuaccagagcacgugcuccgccgucagcaagggcuaccucuccgcccugcgcaccgggugguacaccagcgugaucaccaucgagcuguccaacaucaaggagaacaagugcaacggcaccgacgccaaggugaagcucaucaagcaggagcuggacaaguacaagaacgcggucacggagcugcagcuccugaugcagagcaccccggccgccggcuccgggagcgcgaucgccuccggcaucgccgucugcaaggugcugcaccucgagggcgaggugaacaagaucaagaacgcccugcuguccaccaacaaggccgucgugagccucuccggcugcggggugagcguccugaccuucaaggugcuggaccucaagaacuacaucgacaagcagcugcugcccauccugaacaagcagagcugcuccaucagcaacaucgagaccgucaucgaguuccagcagaagaacaaccgccuccuggagaucacgcgggaguucagcgugaacgcgggcgugaccacccccgucuccaccuacaugcugacgaacagcgagcuccugucccugaucaacgacaugccgaucaccaacgaccagaagaagcucaugagcaacaacgugcagaucgugcgccagcaguccuacagcaucaugugcaucaucaaggaggagguccuggccuacguggugcagcugccccucuacggggucaucgacacccccugcuggaagcugcacaccagcccccugugcacgaccaacaccaaggagggcuccaacaucugccucacccggacggaccgcgggugguacugcgacaacgccggcagcguguccuucuucccgcaggccgagaccugcaagguccagagcaaccggguguucugcgacaccaugaacucccggacccugcccagcgaggugaaccucugcaacaucgacaucuucaaccccaaguacgacugcaagaucaugacguccaagaccgacgucagcuccagcgugaucaccucccugggcgccaucgugagcugcuacgggaagaccaagugcacggcgagcaacaagugccgcggcaucaucaagaccuucuccaacgggugcgacuacgucagcaacaagggcguggacaccguguccgucggcaacacccuguacuacgugaacaagcaggagggcaagagccucuacgugaagggggagcccaucaucaacuucuacgacccgcuggucuuccccuccgacgaguucgacgccagcaucucccaggugaacgagaagaucaaccagagccuggccuucauccggaaguccgacgagcuccugcacaacgugaacgucggcaagagcaccacgaacaucaugaucaccaccaucaucaucgugaucaucgugauccugcugcuccugaucgccgucgggcuguuccucuacugcaaggcccgcugaggacuagucccuguucccagagcccacuuuuuuuucuuuuuuugaaauaaaauagccugucuuucagaucucaaaggcucuuuucagagccaccaaaaaaaaaaaaaaaaaaaaaaaaaaaaaaaaaaaaaaaaaaaaaaaaaaaaaaaaaaaaaaaaaaaaaaaaaaaaaaaaaaaaaaaaaaaaaaaaaaaaa

SEQ ID NO: 21533 - RNA, 1820 nt, Artificial Sequence
  mRNA product Design a-1 (hSL-A100) comprising derived and/or modified sequence from HRSV(Memphis-37)__AIY60640.1__F-del_DSCav1_mut5 (opt1)
aggagagucccgcagucggcguccagcggcucugcuuguucgugugugugucguugcaggccuuauucaagcuuaccauggagcugcccauccucaagaccaacgccaucaccacgauccuggccgcggugacccugugcuucgccagcucccagaacaucaccgaggaguucuaccagagcacgugcuccgccgucagcaagggcuaccucuccgcccugcgcaccgggugguacaccagcgugaucaccaucgagcuguccaacaucaaggagaacaagugcaacggcaccgacgccaaggugaagcucaucaagcaggagcuggacaaguacaagaacgcggucacggagcugcagcuccugaugcagagcaccccggccgccggguccggcagcgccaucgcguccgggaucgccgugugcaaggugcugcaccucgagggcgaggucaacaagaucaagaacgcccugcugagcaccaacaaggccguggugucccucagcggcugcggggucuccgugcugaccuucaaggugcuggaccucaagaacuacaucgacaagcagcugcugcccauccucaacaagcagagcugcuccaucagcaacaucgagacggucaucgaguuccagcagaagaacaaccggcugcuggagaucacccgcgaguucuccgugaacgccggcgugaccacccccgucagcacguacaugcucaccaacagcgagcugcugucccucaucaacgacaugcccaucaccaacgaccagaagaagcugaugagcaacaacgugcagaucgugcggcagcaguccuacagcaucaugugcaucaucaaggaggagguccuggcguacguggugcagcucccgcuguacggggucaucgacacccccugcuggaagcugcacacgagcccccucugcaccaccaacaccaaggagggcuccaacaucugccugacgcgcaccgaccgggggugguacugcgacaacgccggcuccgugagcuucuucccccaggccgagaccugcaaggugcaguccaaccgcgucuucugcgacaccaugaacagccggacgcucccguccgaggugaaccugugcaacaucgacaucuucaaccccaaguacgacugcaagaucaugaccagcaagaccgacgucuccagcuccgugaucaccagccugggcgccaucguguccugcuacgggaagacgaagugcaccgccagcaacaagugccggggcaucaucaagaccuucuccaacgggugcgacuacgucagcaacaagggcguggacaccgugagcgucggcaacacgcucuacuacgugaacaagcaggaggggaagucccuguacgugaagggcgagcccaucaucaacuucuacgacccccuggucuucccgagcgacgaguucgacgcguccaucagccaggugaacgagaagaucaaccagucccucgccuucauccgcaagagcgacgagcugcugcacaacgugaacgucgggaaguccaccaccaacaucaugaucaccaccaucaucaucgugaucaucgugauccuccugcugcucaucgccgucggccuguuccuguacugcaaggcccggugaggacuagucccuguucccagagcccacuuuuuuuucuuuuuuugaaauaaaauagccugucuuucagaucucaaaggcucuuuucagagccaccaaaaaaaaaaaaaaaaaaaaaaaaaaaaaaaaaaaaaaaaaaaaaaaaaaaaaaaaaaaaaaaaaaaaaaaaaaaaaaaaaaaaaaaaaaaaaaaaaaaaa

SEQ ID NO: 21534 - RNA, 1820 nt, Artificial Sequence
  mRNA product Design a-1 (hSL-A100) comprising derived and/or modified sequence from HRSV(Memphis-37)__AIY60640.1__F-del_DSCav1_mut5 (opt1)
aggagagucccgcagucggcguccagcggcucugcuuguucgugugugugucguugcaggccuuauucaagcuuaccauggagcugcccauccucaagaccaacgccaucaccacgauccuggccgcggugacccugugcuucgccagcucccagaacaucaccgaggaguucuaccagagcacgugcuccgccgucagcaagggcuaccucuccgcccugcgcaccgggugguacaccagcgugaucaccaucgagcuguccaacaucaaggagaacaagugcaacggcaccgacgccaaggugaagcucaucaagcaggagcuggacaaguacaagaacgcggucacggagcugcagcuccugaugcagagcaccccggccgccggguccggcagcgccaucgcguccgggaucgccgugugcaaggugcugcaccucgagggcgaggucaacaagaucaagaacgcccugcugagcaccaacaaggccguggugucccucagcggcugcggggucuccgugcugaccuucaaggugcuggaccucaagaacuacaucgacaagcagcugcugcccauccucaacaagcagagcugcuccaucagcaacaucgagacggucaucgaguuccagcagaagaacaaccggcugcuggagaucacccgcgaguucuccgugaacgccggcgugaccacccccgucagcacguacaugcucaccaacagcgagcugcugucccucaucaacgacaugcccaucaccaacgaccagaagaagcugaugagcaacaacgugcagaucgugcggcagcaguccuacagcaucaugugcaucaucaaggaggagguccuggcguacguggugcagcucccgcuguacggggucaucgacacccccugcuggaagcugcacacgagcccccucugcaccaccaacaccaaggagggcagcaacaucugccugacgcgcaccgaccgggggugguacugcgacaacgccggcuccgugagcuucuucccccaggccgagaccugcaaggugcaguccaaccgcgucuucugcgacaccaugaacagccggacgcugccguccgaggugaaccucugcaacaucgacaucuucaaccccaaguacgacugcaagaucaugaccagcaagaccgacgucuccagcuccgugaucaccagccugggcgccaucguguccugcuacgggaagacgaagugcaccgccagcaacaagugccgcggcaucaucaagaccuucuccaacgggugcgacuacgucagcaacaagggcguggacaccgugagcgucggcaacacgcuguacuacgugaacaagcaggaggggaagucccucuacgugaagggcgagcccaucaucaacuucuacgacccccuggucuucccgagcgacgaguucgacgcguccaucagccaggugaacgagaagaucaaccagucccuggccuucauccggaaguccgacgagcuccugcacaacgugaacgucgggaaguccaccaccaacaucaugaucaccaccaucaucaucgugaucaucgugauccugcuccugcugaucgccgucggccuguuccucuacugcaaggcccgcugaggacuagucccuguucccagagcccacuuuuuuuucuuuuuuugaaauaaaauagccugucuuucagaucucaaaggcucuuuucagagccaccaaaaaaaaaaaaaaaaaaaaaaaaaaaaaaaaaaaaaaaaaaaaaaaaaaaaaaaaaaaaaaaaaaaaaaaaaaaaaaaaaaaaaaaaaaaaaaaaaaaaa

SEQ ID NO: 21535 - RNA, 1880 nt, Artificial Sequence
  mRNA product Design a-1 (hSL-A100) comprising derived and/or modified sequence from HRSV(Memphis-37)__AIY60640.1__F_DSCav1_mut6 (opt1)
aggagagucccgcagucggcguccagcggcucugcuuguucgugugugugucguugcaggccuuauucaagcuuaccauggagcugcccauccucaagaccaacgccaucaccacgauccuggccgcggugacccugugcuucgccagcucccagaacaucaccgaggaguucuaccagagcacgugcuccgccgucagcaagggcuaccucggcgcccugcgcaccgggugguacaccagcgugaucaccaucgagcuguccaacaucaaggagaacaagugcaacggcaccgacgccaaggugaagcucaucaagcaggagcuggacaaguacaagaacgcggucacggaccugcagaugcugaugugcagcaccccggccgccggcuccgggagcgcgaucgccuccggcaucgccgucugcaaggugcugcaccucgagggcgaggugaacaagaucaagaacgcccugcuguccaccaacaaggccgucgugagccucuccaacggggugagcguccugaccuucaaggugcuggaccucaagaacuacaucgacaagcagcugcugcccauccugaacaagcagagcugcuccauccccaaccccgagaccgucauggaguuccagcagaagaacaaccgccuccuggagaucacgcgggaguucagcgugaacgcgggcgugaccacccccgucuccaccuacaugcugacgaacagcgagcuccugucccugaucaacgacaugccgaucaccaacgaccagaagaagcucaugagcaacaacgugcagaucgugcgccagcaguccuacagcaucaugugcaucaucaaggaggagguccuggccuacguggugcagcugccccucuacggggucaucgacacccccugcuggaagcugcacaccagcccccugugcacgaccaacaccaaggagggcuccaacaucugccucacccggacggaccgcgggugguacugcgacaacgccggcagcguguccuucuucccgcaggccgagaccugcaaggucugcagcaaccggguguucugcgacaccaugaacucccugacccugcccagcgaggugaaccucugcaacaucgacaucuucaaccccaaguacgacugcaagaucaugacguccaagaccgacgucagcuccagcgugaucaccucccugggcgccaucgugagcugcuacgggaagaccaagugcacggcgagcaacaagaacaagggcaucaucaagaccuucuccaacgggugcgacuacgucagcaacaagggcguggacaccguguccgucggcaacacccuguacuacgugaacaagcaggagggccagagccucuacgugaagggggagcccaucaucaacuucuacgacccgcuggucuuccccuccgacgaguucgacgccagcaucucccaggugaacgagaagaucaaccagagccuggccuucauccggaaguccgacgagcuccugcacaacgugaacgucggcaagagcaccacgaacaucaugaucaccaccaucaucaucgugaucaucgugauccugcugcuccugaucgccgucgggcuguuccucuacugcaaggcccgcuccacccccgugacgcugagcaaggaccagcuguccgggaucaacaacaucgcguucagcaacugaggacuagucccuguucccagagcccacuuuuuuuucuuuuuuugaaauaaaauagccugucuuucagaucucaaaggcucuuuucagagccaccaaaaaaaaaaaaaaaaaaaaaaaaaaaaaaaaaaaaaaaaaaaaaaaaaaaaaaaaaaaaaaaaaaaaaaaaaaaaaaaaaaaaaaaaaaaaaaaaaaaaa

SEQ ID NO: 21536 - RNA, 1880 nt, Artificial Sequence
  mRNA product Design a-1 (hSL-A100) comprising derived and/or modified sequence from HRSV(Memphis-37)__AIY60640.1__F_DSCav1_mut6 (opt1)
aggagagucccgcagucggcguccagcggcucugcuuguucgugugugugucguugcaggccuuauucaagcuuaccauggagcugcccauccucaagaccaacgccaucaccacgauccuggccgcggugacccugugcuucgccagcucccagaacaucaccgaggaguucuaccagagcacgugcuccgccgucagcaagggcuaccucggggcccugcgcaccggcugguacaccuccgugaucaccaucgagcugagcaacaucaaggagaacaagugcaacgggaccgacgccaaggugaagcucaucaagcaggagcuggacaaguacaagaacgcggucacggaccugcagaugcucaugugcuccaccccggccgccggcagcggguccgccaucgcgagcggcaucgccgugugcaaggugcugcaccuggagggcgaggucaacaagaucaagaacgcccuccuguccaccaacaaggccguggugagccuguccaacggggucagcgugcucaccuucaaggugcuggaccugaagaacuacaucgacaagcagcuccugcccauccugaacaagcaguccugcagcauccccaaccccgagacggucauggaguuccagcagaagaacaaccggcuccuggagaucacccgcgaguucuccgugaacgccggcgugaccaccccggucagcacguacaugcugaccaacuccgagcuccugagccugaucaacgacaugcccaucaccaacgaccagaagaagcucaugagcaacaacgugcagaucgugcggcagcaguccuacagcaucaugugcaucaucaaggaggagguccuggcguacguggugcagcugccccucuacggggucaucgacacccccugcuggaagcugcacacguccccgcugugcaccaccaacaccaaggagggcagcaacaucugccucacgcgcaccgaccgggggugguacugcgacaacgccggcuccgugagcuucuucccccaggccgagaccugcaaggugugcuccaaccgcgucuucugcgacaccaugaacagccugacgcugcccuccgaggugaaccucugcaacaucgacaucuucaaccccaaguacgacugcaagaucaugaccagcaagaccgacgucuccagcuccgugaucaccagccugggcgccaucguguccugcuacgggaagacgaagugcaccgccagcaacaagaacaagggcaucaucaagaccuucuccaacgggugcgacuacgucagcaacaagggcguggacaccguguccgucggcaacacgcuguacuacgugaacaagcaggaggggcagagccucuacgugaagggcgagccgaucaucaacuucuacgacccccuggucuuccccagcgacgaguucgacgcguccaucagccaggugaacgagaagaucaaccagucccuggccuucauccgcaagagcgacgagcuccugcacaacgugaacgucgggaaguccaccaccaacaucaugaucaccaccaucaucaucgugaucaucgugauccugcuccugcugaucgccgucggccucuuccuguacugcaaggcccggagcacgcccgugacccuguccaaggaccagcugagcgggaucaacaacaucgccuucuccaacugaggacuagucccuguucccagagcccacuuuuuuuucuuuuuuugaaauaaaauagccugucuuucagaucucaaaggcucuuuucagagccaccaaaaaaaaaaaaaaaaaaaaaaaaaaaaaaaaaaaaaaaaaaaaaaaaaaaaaaaaaaaaaaaaaaaaaaaaaaaaaaaaaaaaaaaaaaaaaaaaaaaaa

SEQ ID NO: 21537 - RNA, 1880 nt, Artificial Sequence
  mRNA product Design a-1 (hSL-A100) comprising derived and/or modified sequence from HRSV(Memphis-37)__AIY60640.1__F_DSCav1_mut6 (opt1)
aggagagucccgcagucggcguccagcggcucugcuuguucgugugugugucguugcaggccuuauucaagcuuaccauggagcugcccauccucaagaccaacgccaucaccacgauccuggccgcggugacccugugcuucgccagcucccagaacaucaccgaggaguucuaccagagcacgugcuccgccgucagcaagggcuaccucggggcccugcgcaccggcugguacaccuccgugaucaccaucgagcugagcaacaucaaggagaacaagugcaacgggaccgacgccaaggugaagcucaucaagcaggagcuggacaaguacaagaacgcggucacggaccugcagaugcucaugugcuccaccccggccgccggcagcggguccgccaucgcgagcggcaucgccgugugcaaggugcugcaccuggagggcgaggucaacaagaucaagaacgcccuccuguccaccaacaaggccguggugagccuguccaacggggucagcgugcucaccuucaaggugcuggaccugaagaacuacaucgacaagcagcuccugcccauccugaacaagcaguccugcagcauccccaaccccgagacggucauggaguuccagcagaagaacaaccggcuccuggagaucacccgcgaguucuccgugaacgccggcgugaccaccccggucagcacguacaugcugaccaacuccgagcuccugagccugaucaacgacaugcccaucaccaacgaccagaagaagcucaugagcaacaacgugcagaucgugcggcagcaguccuacagcaucaugugcaucaucaaggaggagguccuggcguacguggugcagcugccccucuacggggucaucgacacccccugcuggaagcugcacacguccccgcugugcaccaccaacaccaaggagggcagcaacaucugccucacgcgcaccgaccgggggugguacugcgacaacgccggcuccgugagcuucuucccccaggccgagaccugcaaggugugcuccaaccgcgucuucugcgacaccaugaacagccugacgcugcccuccgaggugaaccucugcaacaucgacaucuucaaccccaaguacgacugcaagaucaugaccagcaagaccgacgucuccagcuccgugaucaccagccugggcgccaucguguccugcuacgggaagacgaagugcaccgccagcaacaagaacaagggcaucaucaagaccuucuccaacgggugcgacuacgucagcaacaagggcguggacaccguguccgucggcaacacgcuguacuacgugaacaagcaggaggggcagagccucuacgugaagggcgagccgaucaucaacuucuacgacccccuggucuuccccagcgacgaguucgacgcguccaucagccaggugaacgagaagaucaaccagucccuggccuucauccgcaagagcgacgagcuccugcacaacgugaacgucgggaaguccaccaccaacaucaugaucaccaccaucaucaucgugaucaucgugauccugcuccugcugaucgccgucggccuguuccucuacugcaaggcccggagcacgcccgugacccuguccaaggaccagcugagcgggaucaacaacaucgccuucuccaacugaggacuagucccuguucccagagcccacuuuuuuuucuuuuuuugaaauaaaauagccugucuuucagaucucaaaggcucuuuucagagccaccaaaaaaaaaaaaaaaaaaaaaaaaaaaaaaaaaaaaaaaaaaaaaaaaaaaaaaaaaaaaaaaaaaaaaaaaaaaaaaaaaaaaaaaaaaaaaaaaaaaaa

SEQ ID NO: 21538 - RNA, 1817 nt, Artificial Sequence
  mRNA product Design a-1 (hSL-A100) comprising derived and/or modified sequence from HRSV(Memphis-37)__AIY60640.1__F-del_DSCav1_mut6 (opt1)
aggagagucccgcagucggcguccagcggcucugcuuguucgugugugugucguugcaggccuuauucaagcuuaccauggagcugcccauccucaagaccaacgccaucaccacgauccuggccgcggugacccugugcuucgccagcucccagaacaucaccgaggaguucuaccagagcacgugcuccgccgucagcaagggcuaccucggcgcccugcgcaccgggugguacaccagcgugaucaccaucgagcuguccaacaucaaggagaacaagugcaacggcaccgacgccaaggugaagcucaucaagcaggagcuggacaaguacaagaacgcggucacggaccugcagaugcugaugugcagcaccccggccgccggcuccgggagcgcgaucgccuccggcaucgccgucugcaaggugcugcaccucgagggcgaggugaacaagaucaagaacgcccugcuguccaccaacaaggccgucgugagccucuccaacggggugagcguccugaccuucaaggugcuggaccucaagaacuacaucgacaagcagcugcugcccauccugaacaagcagagcugcuccauccccaaccccgagaccgucauggaguuccagcagaagaacaaccgccuccuggagaucacgcgggaguucagcgugaacgcgggcgugaccacccccgucuccaccuacaugcugacgaacagcgagcuccugucccugaucaacgacaugccgaucaccaacgaccagaagaagcucaugagcaacaacgugcagaucgugcgccagcaguccuacagcaucaugugcaucaucaaggaggagguccuggccuacguggugcagcugccccucuacggggucaucgacacccccugcuggaagcugcacaccagcccccugugcacgaccaacaccaaggagggcuccaacaucugccucacccggacggaccgcgggugguacugcgacaacgccggcagcguguccuucuucccgcaggccgagaccugcaaggucugcagcaaccggguguucugcgacaccaugaacucccugacccugcccagcgaggugaaccucugcaacaucgacaucuucaaccccaaguacgacugcaagaucaugacguccaagaccgacgucagcuccagcgugaucaccucccugggcgccaucgugagcugcuacgggaagaccaagugcacggcgagcaacaagaacaagggcaucaucaagaccuucuccaacgggugcgacuacgucagcaacaagggcguggacaccguguccgucggcaacacccuguacuacgugaacaagcaggagggccagagccucuacgugaagggggagcccaucaucaacuucuacgacccgcuggucuuccccuccgacgaguucgacgccagcaucucccaggugaacgagaagaucaaccagagccuggccuucauccggaaguccgacgagcuccugcacaacgugaacgucggcaagagcaccacgaacaucaugaucaccaccaucaucaucgugaucaucgugauccugcugcuccugaucgccgucgggcuguuccucuacugcaaggcccgcugaggacuagucccuguucccagagcccacuuuuuuuucuuuuuuugaaauaaaauagccugucuuucagaucucaaaggcucuuuucagagccaccaaaaaaaaaaaaaaaaaaaaaaaaaaaaaaaaaaaaaaaaaaaaaaaaaaaaaaaaaaaaaaaaaaaaaaaaaaaaaaaaaaaaaaaaaaaaaaaaaaaaa

SEQ ID NO: 21539 - RNA, 1817 nt, Artificial Sequence
  mRNA product Design a-1 (hSL-A100) comprising derived and/or modified sequence from HRSV(Memphis-37)__AIY60640.1__F-del_DSCav1_mut6 (opt1)
aggagagucccgcagucggcguccagcggcucugcuuguucgugugugugucguugcaggccuuauucaagcuuaccauggagcugcccauccucaagaccaacgccaucaccacgauccuggccgcggugacccugugcuucgccagcucccagaacaucaccgaggaguucuaccagagcacgugcuccgccgucagcaagggcuaccucggggcccugcgcaccggcugguacaccuccgugaucaccaucgagcugagcaacaucaaggagaacaagugcaacgggaccgacgccaaggugaagcucaucaagcaggagcuggacaaguacaagaacgcggucacggaccugcagaugcucaugugcuccaccccggccgccggcagcggguccgccaucgcgagcggcaucgccgugugcaaggugcugcaccuggagggcgaggucaacaagaucaagaacgcccuccuguccaccaacaaggccguggugagccuguccaacggggucagcgugcucaccuucaaggugcuggaccugaagaacuacaucgacaagcagcuccugcccauccugaacaagcaguccugcagcauccccaaccccgagacggucauggaguuccagcagaagaacaaccggcuccuggagaucacccgcgaguucuccgugaacgccggcgugaccaccccggucagcacguacaugcugaccaacuccgagcuccugagccugaucaacgacaugcccaucaccaacgaccagaagaagcucaugagcaacaacgugcagaucgugcggcagcaguccuacagcaucaugugcaucaucaaggaggagguccuggcguacguggugcagcugccccucuacggggucaucgacacccccugcuggaagcugcacacguccccgcugugcaccaccaacaccaaggagggcagcaacaucugccucacgcgcaccgaccgggggugguacugcgacaacgccggcuccgugagcuucuucccccaggccgagaccugcaaggugugcuccaaccgcgucuucugcgacaccaugaacagccugacgcugcccuccgaggugaaccucugcaacaucgacaucuucaaccccaaguacgacugcaagaucaugaccagcaagaccgacgucuccagcuccgugaucaccagccugggcgccaucguguccugcuacgggaagacgaagugcaccgccagcaacaagaacaagggcaucaucaagaccuucuccaacgggugcgacuacgucagcaacaagggcguggacaccguguccgucggcaacacgcuguacuacgugaacaagcaggaggggcagagccucuacgugaagggcgagccgaucaucaacuucuacgacccccuggucuuccccagcgacgaguucgacgcguccaucagccaggugaacgagaagaucaaccagucccuggccuucauccgcaagagcgacgagcuccugcacaacgugaacgucgggaaguccaccaccaacaucaugaucaccaccaucaucaucgugaucaucgugauccugcuccugcugaucgccgucggccucuuccuguacugcaaggcccggugaggacuagucccuguucccagagcccacuuuuuuuucuuuuuuugaaauaaaauagccugucuuucagaucucaaaggcucuuuucagagccaccaaaaaaaaaaaaaaaaaaaaaaaaaaaaaaaaaaaaaaaaaaaaaaaaaaaaaaaaaaaaaaaaaaaaaaaaaaaaaaaaaaaaaaaaaaaaaaaaaaaaa

SEQ ID NO: 21540 - RNA, 1817 nt, Artificial Sequence
  mRNA product Design a-1 (hSL-A100) comprising derived and/or modified sequence from HRSV(Memphis-37)__AIY60640.1__F-del_DSCav1_mut6 (opt1)
aggagagucccgcagucggcguccagcggcucugcuuguucgugugugugucguugcaggccuuauucaagcuuaccauggagcugcccauccucaagaccaacgccaucaccacgauccuggccgcggugacccugugcuucgccagcucccagaacaucaccgaggaguucuaccagagcacgugcuccgccgucagcaagggcuaccucggggcccugcgcaccggcugguacaccuccgugaucaccaucgagcugagcaacaucaaggagaacaagugcaacgggaccgacgccaaggugaagcucaucaagcaggagcuggacaaguacaagaacgcggucacggaccugcagaugcucaugugcuccaccccggccgccggcagcggguccgccaucgcgagcggcaucgccgugugcaaggugcugcaccuggagggcgaggucaacaagaucaagaacgcccuccuguccaccaacaaggccguggugagccuguccaacggggucagcgugcucaccuucaaggugcuggaccugaagaacuacaucgacaagcagcuccugcccauccugaacaagcaguccugcagcauccccaaccccgagacggucauggaguuccagcagaagaacaaccggcuccuggagaucacccgcgaguucuccgugaacgccggcgugaccaccccggucagcacguacaugcugaccaacuccgagcuccugagccugaucaacgacaugcccaucaccaacgaccagaagaagcucaugagcaacaacgugcagaucgugcggcagcaguccuacagcaucaugugcaucaucaaggaggagguccuggcguacguggugcagcugccccucuacggggucaucgacacccccugcuggaagcugcacacguccccgcugugcaccaccaacaccaaggagggcagcaacaucugccucacgcgcaccgaccgggggugguacugcgacaacgccggcuccgugagcuucuucccccaggccgagaccugcaaggugugcuccaaccgcgucuucugcgacaccaugaacagccugacgcugcccuccgaggugaaccucugcaacaucgacaucuucaaccccaaguacgacugcaagaucaugaccagcaagaccgacgucuccagcuccgugaucaccagccugggcgccaucguguccugcuacgggaagacgaagugcaccgccagcaacaagaacaagggcaucaucaagaccuucuccaacgggugcgacuacgucagcaacaagggcguggacaccguguccgucggcaacacgcuguacuacgugaacaagcaggaggggcagagccucuacgugaagggcgagccgaucaucaacuucuacgacccccuggucuuccccagcgacgaguucgacgcguccaucagccaggugaacgagaagaucaaccagucccuggccuucauccgcaagagcgacgagcuccugcacaacgugaacgucgggaaguccaccaccaacaucaugaucaccaccaucaucaucgugaucaucgugauccugcuccugcugaucgccgucggccuguuccucuacugcaaggcccggugaggacuagucccuguucccagagcccacuuuuuuuucuuuuuuugaaauaaaauagccugucuuucagaucucaaaggcucuuuucagagccaccaaaaaaaaaaaaaaaaaaaaaaaaaaaaaaaaaaaaaaaaaaaaaaaaaaaaaaaaaaaaaaaaaaaaaaaaaaaaaaaaaaaaaaaaaaaaaaaaaaaaa

SEQ ID NO: 21541 - RNA, 1880 nt, Artificial Sequence
  mRNA product Design a-1 (hSL-A100) comprising derived and/or modified sequence from HRSV(Memphis-37)__AIY60640.1__F_DSCav1_mut7 (opt1)
aggagagucccgcagucggcguccagcggcucugcuuguucgugugugugucguugcaggccuuauucaagcuuaccauggagcugcccauccucaagaccaacgccaucaccacgauccuggccgcggugacccugugcuucgccagcucccagaacaucaccgaggaguucuaccagagcacgugcuccgccgucagcaagggcuaccucuccgcccugcgcaccgggugguacaccagcgugaucaccaucgagcuguccaacaucaaggagaacaagugcaacggcaccgacgccaaggugaagcucaucaagcaggagcuggacaaguacaagaacgcggucacggagcugcagaugcugaugugcagcaccccggccgccggcuccgggagcgcgaucgccuccggcaucgccgucugcaaggugcugcaccucgagggcgaggugaacaagaucaagaacgcccugcuguccaccaacaaggccgucgugagccucuccaacggggugagcguccugaccuucaaggugcuggaccucaagaacuacaucgacaagcagcugcugcccauccugaacaagcagagcugcuccaucagcaacaucgagaccgucauggaguuccagcagaagaacaaccgccuccuggagaucacgcgggaguucagcgugaacgcgggcgugaccacccccgucuccaccuacaugcugacgaacagcgagcuccugucccugaucaacgacaugccgaucaccaacgaccagaagaagcucaugagcaacaacgugcagaucgugcgccagcaguccuacagcaucaugugcaucaucaaggaggagguccuggccuacguggugcagcugccccucuacggggucaucgacacccccugcuggaagcugcacaccagcccccugugcacgaccaacaccaaggagggcuccaacaucugccucacccggacggaccgcgggugguacugcgacaacgccggcagcguguccuucuucccgcaggccgagaccugcaaggucugcagcaaccggguguucugcgacaccaugaacucccugacccugcccagcgaggugaaccucugcaacaucgacaucuucaaccccaaguacgacugcaagaucaugacguccaagaccgacgucagcuccagcgugaucaccucccugggcgccaucgugagcugcuacgggaagaccaagugcacggcgagcaacaagaacaagggcaucaucaagaccuucuccaacgggugcgacuacgucagcaacaagggcguggacaccguguccgucggcaacacccuguacuacgugaacaagcaggagggcaagagccucuacgugaagggggagcccaucaucaacuucuacgacccgcuggucuuccccuccgacgaguucgacgccagcaucucccaggugaacgagaagaucaaccagagccuggccuucauccggaaguccgacgagcuccugcacaacgugaacgucggcaagagcaccacgaacaucaugaucaccaccaucaucaucgugaucaucgugauccugcugcuccugaucgccgucgggcuguuccucuacugcaaggcccgcuccacccccgugacgcugagcaaggaccagcuguccgggaucaacaacaucgcguucagcaacugaggacuagucccuguucccagagcccacuuuuuuuucuuuuuuugaaauaaaauagccugucuuucagaucucaaaggcucuuuucagagccaccaaaaaaaaaaaaaaaaaaaaaaaaaaaaaaaaaaaaaaaaaaaaaaaaaaaaaaaaaaaaaaaaaaaaaaaaaaaaaaaaaaaaaaaaaaaaaaaaaaaaa

SEQ ID NO: 21542 - RNA, 1880 nt, Artificial Sequence
  mRNA product Design a-1 (hSL-A100) comprising derived and/or modified sequence from HRSV(Memphis-37)__AIY60640.1__F_DSCav1_mut7 (opt1)
aggagagucccgcagucggcguccagcggcucugcuuguucgugugugugucguugcaggccuuauucaagcuuaccauggagcugcccauccucaagaccaacgccaucaccacgauccuggccgcggugacccugugcuucgccagcucccagaacaucaccgaggaguucuaccagagcacgugcuccgccgucagcaagggcuaccucuccgcccugcgcaccgggugguacaccagcgugaucaccaucgagcuguccaacaucaaggagaacaagugcaacggcaccgacgccaaggugaagcucaucaagcaggagcuggacaaguacaagaacgcggucacggagcugcagaugcucaugugcagcaccccggccgccggguccggcagcgccaucgcguccgggaucgccgugugcaaggugcugcaccuggagggcgaggucaacaagaucaagaacgcccuccugagcaccaacaaggccguggugucccugagcaacggcgucuccgugcucaccuucaaggugcuggaccugaagaacuacaucgacaagcagcuccugcccauccugaacaagcagagcugcuccaucagcaacaucgagacggucauggaguuccagcagaagaacaaccggcuccuggagaucacccgcgaguucuccgugaacgccggggugaccacccccgucagcacguacaugcugaccaacagcgagcuccugucccugaucaacgacaugcccaucaccaacgaccagaagaagcucaugagcaacaacgugcagaucgugcggcagcaguccuacagcaucaugugcaucaucaaggaggagguccuggcguacguggugcagcugccgcucuacggcgucaucgacacccccugcuggaagcugcacacgagcccccugugcaccaccaacaccaaggaggggagcaacaucugccucacgcgcaccgaccggggcugguacugcgacaacgccggguccgugagcuucuucccccaggccgagaccugcaaggugugcuccaaccgcgucuucugcgacaccaugaacagccugacgcugccguccgaggugaaccucugcaacaucgacaucuucaaccccaaguacgacugcaagaucaugaccagcaagaccgacgucuccagcuccgugaucaccagccugggcgccaucguguccugcuacggcaagacgaagugcaccgccagcaacaagaacaaggggaucaucaagaccuucuccaacggcugcgacuacgucagcaacaaggggguggacaccgugagcgucggcaacacgcuguacuacgugaacaagcaggagggcaagucccucuacgugaagggggagcccaucaucaacuucuacgacccccuggucuucccgagcgacgaguucgacgcguccaucagccaggugaacgagaagaucaaccagucccuggccuucauccggaaguccgacgagcuccugcacaacgugaacgucggcaaguccaccaccaacaucaugaucaccaccaucaucaucgugaucaucgugauccugcuccugcugaucgccgucggccucuuccuguacugcaaggcccgcagcacgcccgugacccuguccaaggaccagcugagcgggaucaacaacaucgccuucuccaacugaggacuagucccuguucccagagcccacuuuuuuuucuuuuuuugaaauaaaauagccugucuuucagaucucaaaggcucuuuucagagccaccaaaaaaaaaaaaaaaaaaaaaaaaaaaaaaaaaaaaaaaaaaaaaaaaaaaaaaaaaaaaaaaaaaaaaaaaaaaaaaaaaaaaaaaaaaaaaaaaaaaaa

SEQ ID NO: 21543 - RNA, 1880 nt, Artificial Sequence
  mRNA product Design a-1 (hSL-A100) comprising derived and/or modified sequence from HRSV(Memphis-37)__AIY60640.1__F_DSCav1_mut7 (opt1)
aggagagucccgcagucggcguccagcggcucugcuuguucgugugugugucguugcaggccuuauucaagcuuaccauggagcugcccauccucaagaccaacgccaucaccacgauccuggccgcggugacccugugcuucgccagcucccagaacaucaccgaggaguucuaccagagcacgugcuccgccgucagcaagggcuaccucuccgcccugcgcaccgggugguacaccagcgugaucaccaucgagcuguccaacaucaaggagaacaagugcaacggcaccgacgccaaggugaagcucaucaagcaggagcuggacaaguacaagaacgcggucacggagcugcagaugcucaugugcagcaccccggccgccggguccggcagcgccaucgcguccgggaucgccgugugcaaggugcugcaccuggagggcgaggucaacaagaucaagaacgcccuccugagcaccaacaaggccguggugucccugagcaacggcgucuccgugcucaccuucaaggugcuggaccugaagaacuacaucgacaagcagcuccugcccauccugaacaagcagagcugcuccaucagcaacaucgagacggucauggaguuccagcagaagaacaaccggcuccuggagaucacccgcgaguucuccgugaacgccggggugaccacccccgucagcacguacaugcugaccaacagcgagcuccugucccugaucaacgacaugcccaucaccaacgaccagaagaagcucaugagcaacaacgugcagaucgugcggcagcaguccuacagcaucaugugcaucaucaaggaggagguccuggcguacguggugcagcugccgcucuacggcgucaucgacacccccugcuggaagcugcacacgagcccccugugcaccaccaacaccaaggaggggagcaacaucugccucacgcgcaccgaccggggcugguacugcgacaacgccggguccgugagcuucuucccccaggccgagaccugcaaggugugcuccaaccgcgucuucugcgacaccaugaacagccugacgcugccguccgaggugaaccucugcaacaucgacaucuucaaccccaaguacgacugcaagaucaugaccagcaagaccgacgucuccagcuccgugaucaccagccugggcgccaucguguccugcuacggcaagacgaagugcaccgccagcaacaagaacaaggggaucaucaagaccuucuccaacggcugcgacuacgucagcaacaaggggguggacaccgugagcgucggcaacacgcuguacuacgugaacaagcaggagggcaagucccucuacgugaagggggagcccaucaucaacuucuacgacccccuggucuucccgagcgacgaguucgacgcguccaucagccaggugaacgagaagaucaaccagucccuggccuucauccggaaguccgacgagcuccugcacaacgugaacgucggcaaguccaccaccaacaucaugaucaccaccaucaucaucgugaucaucgugauccugcuccugcugaucgccgucgggcuguuccucuacugcaaggcccgcagcacgcccgugacccuguccaaggaccagcugagcggcaucaacaacaucgccuucuccaacugaggacuagucccuguucccagagcccacuuuuuuuucuuuuuuugaaauaaaauagccugucuuucagaucucaaaggcucuuuucagagccaccaaaaaaaaaaaaaaaaaaaaaaaaaaaaaaaaaaaaaaaaaaaaaaaaaaaaaaaaaaaaaaaaaaaaaaaaaaaaaaaaaaaaaaaaaaaaaaaaaaaaa

SEQ ID NO: 21544 - RNA, 1817 nt, Artificial Sequence
  mRNA product Design a-1 (hSL-A100) comprising derived and/or modified sequence from HRSV(Memphis-37)__AIY60640.1__F-del_DSCav1_mut7 (opt1)
aggagagucccgcagucggcguccagcggcucugcuuguucgugugugugucguugcaggccuuauucaagcuuaccauggagcugcccauccucaagaccaacgccaucaccacgauccuggccgcggugacccugugcuucgccagcucccagaacaucaccgaggaguucuaccagagcacgugcuccgccgucagcaagggcuaccucuccgcccugcgcaccgggugguacaccagcgugaucaccaucgagcuguccaacaucaaggagaacaagugcaacggcaccgacgccaaggugaagcucaucaagcaggagcuggacaaguacaagaacgcggucacggagcugcagaugcugaugugcagcaccccggccgccggcuccgggagcgcgaucgccuccggcaucgccgucugcaaggugcugcaccucgagggcgaggugaacaagaucaagaacgcccugcuguccaccaacaaggccgucgugagccucuccaacggggugagcguccugaccuucaaggugcuggaccucaagaacuacaucgacaagcagcugcugcccauccugaacaagcagagcugcuccaucagcaacaucgagaccgucauggaguuccagcagaagaacaaccgccuccuggagaucacgcgggaguucagcgugaacgcgggcgugaccacccccgucuccaccuacaugcugacgaacagcgagcuccugucccugaucaacgacaugccgaucaccaacgaccagaagaagcucaugagcaacaacgugcagaucgugcgccagcaguccuacagcaucaugugcaucaucaaggaggagguccuggccuacguggugcagcugccccucuacggggucaucgacacccccugcuggaagcugcacaccagcccccugugcacgaccaacaccaaggagggcuccaacaucugccucacccggacggaccgcgggugguacugcgacaacgccggcagcguguccuucuucccgcaggccgagaccugcaaggucugcagcaaccggguguucugcgacaccaugaacucccugacccugcccagcgaggugaaccucugcaacaucgacaucuucaaccccaaguacgacugcaagaucaugacguccaagaccgacgucagcuccagcgugaucaccucccugggcgccaucgugagcugcuacgggaagaccaagugcacggcgagcaacaagaacaagggcaucaucaagaccuucuccaacgggugcgacuacgucagcaacaagggcguggacaccguguccgucggcaacacccuguacuacgugaacaagcaggagggcaagagccucuacgugaagggggagcccaucaucaacuucuacgacccgcuggucuuccccuccgacgaguucgacgccagcaucucccaggugaacgagaagaucaaccagagccuggccuucauccggaaguccgacgagcuccugcacaacgugaacgucggcaagagcaccacgaacaucaugaucaccaccaucaucaucgugaucaucgugauccugcugcuccugaucgccgucgggcuguuccucuacugcaaggcccgcugaggacuagucccuguucccagagcccacuuuuuuuucuuuuuuugaaauaaaauagccugucuuucagaucucaaaggcucuuuucagagccaccaaaaaaaaaaaaaaaaaaaaaaaaaaaaaaaaaaaaaaaaaaaaaaaaaaaaaaaaaaaaaaaaaaaaaaaaaaaaaaaaaaaaaaaaaaaaaaaaaaaaa

SEQ ID NO: 21545 - RNA, 1817 nt, Artificial Sequence
  mRNA product Design a-1 (hSL-A100) comprising derived and/or modified sequence from HRSV(Memphis-37)__AIY60640.1__F-del_DSCav1_mut7 (opt1)
aggagagucccgcagucggcguccagcggcucugcuuguucgugugugugucguugcaggccuuauucaagcuuaccauggagcugcccauccucaagaccaacgccaucaccacgauccuggccgcggugacccugugcuucgccagcucccagaacaucaccgaggaguucuaccagagcacgugcuccgccgucagcaagggguaccucuccgcccugcgcaccgggugguacaccagcgugaucaccaucgagcuguccaacaucaaggagaacaagugcaacggcaccgacgccaaggugaagcucaucaagcaggagcuggacaaguacaagaacgcggucacggagcugcagaugcucaugugcagcaccccggccgccggguccggcagcgccaucgcguccgggaucgccgugugcaaggugcugcaccuggagggcgaggucaacaagaucaagaacgcccuccugagcaccaacaaggccguggugucccugagcaacggcgucuccgugcucaccuucaaggugcuggaccugaagaacuacaucgacaagcagcuccugcccauccugaacaagcagagcugcuccaucagcaacaucgagacggucauggaguuccagcagaagaacaaccggcuccuggagaucacccgcgaguucuccgugaacgccggggugaccacccccgucagcacguacaugcugaccaacagcgagcuccugucccugaucaacgacaugcccaucaccaacgaccagaagaagcucaugagcaacaacgugcagaucgugcggcagcaguccuacagcaucaugugcaucaucaaggaggagguccuggcguacguggugcagcugccgcucuacggcgucaucgacacccccugcuggaagcugcacacgagcccccugugcaccaccaacaccaaggaggggagcaacaucugccucacgcgcaccgaccggggcugguacugcgacaacgccggguccgugagcuucuucccccaggccgagaccugcaaggugugcuccaaccgcgucuucugcgacaccaugaacagccugacgcugccguccgaggugaaccucugcaacaucgacaucuucaaccccaaguacgacugcaagaucaugaccagcaagaccgacgucuccagcuccgugaucaccagccugggcgccaucguguccugcuacggcaagacgaagugcaccgccagcaacaagaacaaggggaucaucaagaccuucuccaacggcugcgacuacgucagcaacaaggggguggacaccgugagcgucggcaacacgcuguacuacgugaacaagcaggagggcaagucccucuacgugaagggggagcccaucaucaacuucuacgacccccuggucuucccgagcgacgaguucgacgcguccaucagccaggugaacgagaagaucaaccagucccuggccuucauccggaaguccgacgagcuccugcacaacgugaacgucggcaaguccaccaccaacaucaugaucaccaccaucaucaucgugaucaucgugauccugcuccugcugaucgccgucggccucuuccuguacugcaaggcccgcugaggacuagucccuguucccagagcccacuuuuuuuucuuuuuuugaaauaaaauagccugucuuucagaucucaaaggcucuuuucagagccaccaaaaaaaaaaaaaaaaaaaaaaaaaaaaaaaaaaaaaaaaaaaaaaaaaaaaaaaaaaaaaaaaaaaaaaaaaaaaaaaaaaaaaaaaaaaaaaaaaaaaa

SEQ ID NO: 21546 - RNA, 1817 nt, Artificial Sequence
  mRNA product Design a-1 (hSL-A100) comprising derived and/or modified sequence from HRSV(Memphis-37)__AIY60640.1__F-del_DSCav1_mut7 (opt1)
aggagagucccgcagucggcguccagcggcucugcuuguucgugugugugucguugcaggccuuauucaagcuuaccauggagcugcccauccucaagaccaacgccaucaccacgauccuggccgcggugacccugugcuucgccagcucccagaacaucaccgaggaguucuaccagagcacgugcuccgccgucagcaagggcuaccucuccgcccugcgcaccgggugguacaccagcgugaucaccaucgagcuguccaacaucaaggagaacaagugcaacggcaccgacgccaaggugaagcucaucaagcaggagcuggacaaguacaagaacgcggucacggagcugcagaugcucaugugcagcaccccggccgccggguccggcagcgccaucgcguccgggaucgccgugugcaaggugcugcaccuggagggcgaggucaacaagaucaagaacgcccuccugagcaccaacaaggccguggugucccugagcaacggcgucuccgugcucaccuucaaggugcuggaccugaagaacuacaucgacaagcagcuccugcccauccugaacaagcagagcugcuccaucagcaacaucgagacggucauggaguuccagcagaagaacaaccggcuccuggagaucacccgcgaguucuccgugaacgccggggugaccacccccgucagcacguacaugcugaccaacagcgagcuccugucccugaucaacgacaugcccaucaccaacgaccagaagaagcucaugagcaacaacgugcagaucgugcggcagcaguccuacagcaucaugugcaucaucaaggaggagguccuggcguacguggugcagcugccgcucuacggcgucaucgacacccccugcuggaagcugcacacgagcccccugugcaccaccaacaccaaggaggggagcaacaucugccucacgcgcaccgaccggggcugguacugcgacaacgccggguccgugagcuucuucccccaggccgagaccugcaaggugugcuccaaccgcgucuucugcgacaccaugaacagccugacgcugccguccgaggugaaccucugcaacaucgacaucuucaaccccaaguacgacugcaagaucaugaccagcaagaccgacgucuccagcuccgugaucaccagccugggcgccaucguguccugcuacggcaagacgaagugcaccgccagcaacaagaacaaggggaucaucaagaccuucuccaacggcugcgacuacgucagcaacaaggggguggacaccgugagcgucggcaacacgcuguacuacgugaacaagcaggagggcaagucccucuacgugaagggggagcccaucaucaacuucuacgacccccuggucuucccgagcgacgaguucgacgcguccaucagccaggugaacgagaagaucaaccagucccuggccuucauccggaaguccgacgagcuccugcacaacgugaacgucggcaaguccaccaccaacaucaugaucaccaccaucaucaucgugaucaucgugauccugcuccugcugaucgccgucgggcuguuccucuacugcaaggcccgcugaggacuagucccuguucccagagcccacuuuuuuuucuuuuuuugaaauaaaauagccugucuuucagaucucaaaggcucuuuucagagccaccaaaaaaaaaaaaaaaaaaaaaaaaaaaaaaaaaaaaaaaaaaaaaaaaaaaaaaaaaaaaaaaaaaaaaaaaaaaaaaaaaaaaaaaaaaaaaaaaaaaaa

SEQ ID NO: 21547 - RNA, 1883 nt, Artificial Sequence
  mRNA product Design a-1 (hSL-A100) comprising derived and/or modified sequence from HRSV(Memphis-37)__AIY60640.1__F_DSCav1_mut8 (opt1)
aggagagucccgcagucggcguccagcggcucugcuuguucgugugugugucguugcaggccuuauucaagcuuaccauggagcugcccauccucaagaccaacgccaucaccacgauccuggccgcggugacccugugcuucgccagcucccagaacaucaccgaggaguucuaccagagcacgugcuccgccgucagcaagggcuaccucggcgcccugcgcaccgggugguacaccagcgugaucaccaucgagcuguccaacaucaaggagaucaagugcaacggcaccgacgccaaggugaagcucaucaagcaggagcuggacaaguacaagaacgcggucacggaccugcagcuccugaugcagagcaccccggccgccggcuccgggagcgcgaucgccuccggcaucgccgucugcaaggugcugcaccucgagggcgaggugaacaagaucaagaacgcccugcuguccaccaacaaggccgucgugagccucuccggcugcggggugagcguccugaccuucaaggugcuggaccucaagaacuacaucgacaagcagcugcugcccauccugaacaagcagagcugcuccauccccaacaucgagaccgucaucgaguuccagcagaagaacaaccgccuccuggagaucacgcgggaguucagcgugaacgcgggcgugaccacccccgucuccaccuacaugcugacgaacagcgagcuccugucccugaucaacgacaugccgaucaccaacgaccagaagaagcucaugagcaacaacgugcagaucgugcgccagcaguccuacagcaucaugugcaucaucaaggaggagguccuggccuacguggugcagcugccccucuacggggucaucgacacccccugcuggaagcugcacaccagcccccugugcacgaccaacaccaaggagggcuccaacaucugccucacccggacggaccgcgggugguacugcgacaacgccggcagcguguccuucuucccgcaggccgagaccugcaagguccagagcaaccggguguucugcgacaccaugaacucccugacccugcccagcgaggugaaccucugcaacaucgacaucuucaaccccaaguacgacugcaagaucaugacguccaagaccgacgucagcuccagcgugaucaccucccugggcgccaucgugagcugcuacgggaagaccaagugcacggcgagcaacaagugccgcggcaucaucaagaccuucuccaacgggugcgacuacgucagcaacaagggcguggacaccguguccgucggcaacacccuguacuacgugaacaagcaggagggccagagccucuacgugaagggggagcccaucaucaacuucuacgacccgcuggucuuccccuccgacgaguucgacgccagcaucucccaggugaacgagaagaucaaccagagccuggccuucauccggaaguccgacgagcuccugcacaacgugaacgucggcaagagcaccacgaacaucaugaucaccaccaucaucaucgugaucaucgugauccugcugcuccugaucgccgucgggcuguuccucuacugcaaggcccgcuccacccccgugacgcugagcaaggaccagcuguccgggaucaacaacaucgcguucagcaacugaggacuagucccuguucccagagcccacuuuuuuuucuuuuuuugaaauaaaauagccugucuuucagaucucaaaggcucuuuucagagccaccaaaaaaaaaaaaaaaaaaaaaaaaaaaaaaaaaaaaaaaaaaaaaaaaaaaaaaaaaaaaaaaaaaaaaaaaaaaaaaaaaaaaaaaaaaaaaaaaaaaaa

SEQ ID NO: 21548 - RNA, 1883 nt, Artificial Sequence
  mRNA product Design a-1 (hSL-A100) comprising derived and/or modified sequence from HRSV(Memphis-37)__AIY60640.1__F_DSCav1_mut8 (opt1)
aggagagucccgcagucggcguccagcggcucugcuuguucgugugugugucguugcaggccuuauucaagcuuaccauggagcugcccauccucaagaccaacgccaucaccacgauccuggccgcggugacccugugcuucgccagcucccagaacaucaccgaggaguucuaccagagcacgugcuccgccgucagcaagggcuaccucggggcccugcgcaccggcugguacaccuccgugaucaccaucgagcugagcaacaucaaggagaucaagugcaacgggaccgacgccaaggugaagcucaucaagcaggagcuggacaaguacaagaacgcggucacggaccugcagcuccugaugcaguccaccccggccgccggcagcggguccgccaucgcgagcggcaucgccgugugcaaggugcugcaccucgagggcgaggucaacaagaucaagaacgcccugcuguccaccaacaaggccguggugagccucuccgggugcggcgucagcgugcugaccuucaaggugcuggaccucaagaacuacaucgacaagcagcugcugcccauccucaacaagcaguccugcagcauccccaacaucgagacggucaucgaguuccagcagaagaacaaccggcugcuggagaucacccgcgaguucuccgugaacgccggggugaccacccccgucagcacguacaugcucaccaacuccgagcugcugagccucaucaacgacaugccgaucaccaacgaccagaagaagcugaugagcaacaacgugcagaucgugcggcagcaguccuacagcaucaugugcaucaucaaggaggagguccuggcguacguggugcagcucccccuguacggcgucaucgacacccccugcuggaagcugcacacgagcccccucugcaccaccaacaccaaggagggguccaacaucugccugacgcgcaccgaccggggcugguacugcgacaacgccggcuccgugagcuucuucccgcaggccgagaccugcaaggugcaguccaaccgcgucuucugcgacaccaugaacagccugacgcuccccuccgaggugaaccugugcaacaucgacaucuucaaccccaaguacgacugcaagaucaugaccagcaagaccgacgucuccagcuccgugaucaccagccugggggccaucguguccugcuacggcaagacgaagugcaccgccagcaacaagugccgggggaucaucaagaccuucuccaacggcugcgacuacgucagcaacaagggcguggacaccguguccgucgggaacacgcucuacuacgugaacaagcaggagggccagagccuguacgugaagggggagcccaucaucaacuucuacgacccgcuggucuuccccagcgacgaguucgacgcguccaucagccaggugaacgagaagaucaaccagucccucgccuucauccgcaagagcgacgagcugcugcacaacgugaacgucggcaaguccaccaccaacaucaugaucaccaccaucaucaucgugaucaucgugauccuccugcugcucaucgccgucgggcuguuccuguacugcaaggcccggagcacgcccgugacccuguccaaggaccagcucagcggcaucaacaacaucgccuucuccaacugaggacuagucccuguucccagagcccacuuuuuuuucuuuuuuugaaauaaaauagccugucuuucagaucucaaaggcucuuuucagagccaccaaaaaaaaaaaaaaaaaaaaaaaaaaaaaaaaaaaaaaaaaaaaaaaaaaaaaaaaaaaaaaaaaaaaaaaaaaaaaaaaaaaaaaaaaaaaaaaaaaaaa

SEQ ID NO: 21549 - RNA, 1883 nt, Artificial Sequence
  mRNA product Design a-1 (hSL-A100) comprising derived and/or modified sequence from HRSV(Memphis-37)__AIY60640.1__F_DSCav1_mut8 (opt1)
aggagagucccgcagucggcguccagcggcucugcuuguucgugugugugucguugcaggccuuauucaagcuuaccauggagcugcccauccucaagaccaacgccaucaccacgauccuggccgcggugacccugugcuucgccagcucccagaacaucaccgaggaguucuaccagagcacgugcuccgccgucagcaagggcuaccucggggcccugcgcaccggcugguacaccuccgugaucaccaucgagcugagcaacaucaaggagaucaagugcaacgggaccgacgccaaggugaagcucaucaagcaggagcuggacaaguacaagaacgcggucacggaccugcagcuccugaugcaguccaccccggccgccggcagcggguccgccaucgcgagcggcaucgccgugugcaaggugcugcaccucgagggcgaggucaacaagaucaagaacgcccugcuguccaccaacaaggccguggugagccucuccgggugcggcgucagcgugcugaccuucaaggugcuggaccucaagaacuacaucgacaagcagcugcugcccauccucaacaagcaguccugcagcauccccaacaucgagacggucaucgaguuccagcagaagaacaaccggcugcuggagaucacccgcgaguucuccgugaacgccggggugaccacccccgucagcacguacaugcucaccaacuccgagcugcugagccucaucaacgacaugccgaucaccaacgaccagaagaagcugaugagcaacaacgugcagaucgugcggcagcaguccuacagcaucaugugcaucaucaaggaggagguccuggcguacguggugcagcucccccuguacggcgucaucgacacccccugcuggaagcugcacacgagcccccucugcaccaccaacaccaaggagggguccaacaucugccugacgcgcaccgaccggggcugguacugcgacaacgccggcuccgugagcuucuucccgcaggccgagaccugcaaggugcaguccaaccgcgucuucugcgacaccaugaacagccugacgcuccccuccgaggugaaccugugcaacaucgacaucuucaaccccaaguacgacugcaagaucaugaccagcaagaccgacgucuccagcuccgugaucaccagccugggggccaucguguccugcuacggcaagacgaagugcaccgccagcaacaagugccgggggaucaucaagaccuucuccaacggcugcgacuacgucagcaacaagggcguggacaccguguccgucgggaacacgcucuacuacgugaacaagcaggagggccagagccuguacgugaagggggagcccaucaucaacuucuacgacccgcuggucuuccccagcgacgaguucgacgcguccaucagccaggugaacgagaagaucaaccagucccucgccuucauccgcaagagcgacgagcugcugcacaacgugaacgucggcaaguccaccaccaacaucaugaucaccaccaucaucaucgugaucaucgugauccuccugcugcugaucgccgucggccucuuccuguacugcaaggcccggagcacgcccgugacccuguccaaggaccagcucagcgggaucaacaacaucgccuucuccaacugaggacuagucccuguucccagagcccacuuuuuuuucuuuuuuugaaauaaaauagccugucuuucagaucucaaaggcucuuuucagagccaccaaaaaaaaaaaaaaaaaaaaaaaaaaaaaaaaaaaaaaaaaaaaaaaaaaaaaaaaaaaaaaaaaaaaaaaaaaaaaaaaaaaaaaaaaaaaaaaaaaaaa

SEQ ID NO: 21550 - RNA, 1820 nt, Artificial Sequence
  mRNA product Design a-1 (hSL-A100) comprising derived and/or modified sequence from HRSV(Memphis-37)__AIY60640.1__F-del_DSCav1_mut8 (opt1)
aggagagucccgcagucggcguccagcggcucugcuuguucgugugugugucguugcaggccuuauucaagcuuaccauggagcugcccauccucaagaccaacgccaucaccacgauccuggccgcggugacccugugcuucgccagcucccagaacaucaccgaggaguucuaccagagcacgugcuccgccgucagcaagggcuaccucggcgcccugcgcaccgggugguacaccagcgugaucaccaucgagcuguccaacaucaaggagaucaagugcaacggcaccgacgccaaggugaagcucaucaagcaggagcuggacaaguacaagaacgcggucacggaccugcagcuccugaugcagagcaccccggccgccggcuccgggagcgcgaucgccuccggcaucgccgucugcaaggugcugcaccucgagggcgaggugaacaagaucaagaacgcccugcuguccaccaacaaggccgucgugagccucuccggcugcggggugagcguccugaccuucaaggugcuggaccucaagaacuacaucgacaagcagcugcugcccauccugaacaagcagagcugcuccauccccaacaucgagaccgucaucgaguuccagcagaagaacaaccgccuccuggagaucacgcgggaguucagcgugaacgcgggcgugaccacccccgucuccaccuacaugcugacgaacagcgagcuccugucccugaucaacgacaugccgaucaccaacgaccagaagaagcucaugagcaacaacgugcagaucgugcgccagcaguccuacagcaucaugugcaucaucaaggaggagguccuggccuacguggugcagcugccccucuacggggucaucgacacccccugcuggaagcugcacaccagcccccugugcacgaccaacaccaaggagggcuccaacaucugccucacccggacggaccgcgggugguacugcgacaacgccggcagcguguccuucuucccgcaggccgagaccugcaagguccagagcaaccggguguucugcgacaccaugaacucccugacccugcccagcgaggugaaccucugcaacaucgacaucuucaaccccaaguacgacugcaagaucaugacguccaagaccgacgucagcuccagcgugaucaccucccugggcgccaucgugagcugcuacgggaagaccaagugcacggcgagcaacaagugccgcggcaucaucaagaccuucuccaacgggugcgacuacgucagcaacaagggcguggacaccguguccgucggcaacacccuguacuacgugaacaagcaggagggccagagccucuacgugaagggggagcccaucaucaacuucuacgacccgcuggucuuccccuccgacgaguucgacgccagcaucucccaggugaacgagaagaucaaccagagccuggccuucauccggaaguccgacgagcuccugcacaacgugaacgucggcaagagcaccacgaacaucaugaucaccaccaucaucaucgugaucaucgugauccugcugcuccugaucgccgucgggcuguuccucuacugcaaggcccgcugaggacuagucccuguucccagagcccacuuuuuuuucuuuuuuugaaauaaaauagccugucuuucagaucucaaaggcucuuuucagagccaccaaaaaaaaaaaaaaaaaaaaaaaaaaaaaaaaaaaaaaaaaaaaaaaaaaaaaaaaaaaaaaaaaaaaaaaaaaaaaaaaaaaaaaaaaaaaaaaaaaaaa

SEQ ID NO: 21551 - RNA, 1820 nt, Artificial Sequence
  mRNA product Design a-1 (hSL-A100) comprising derived and/or modified sequence from HRSV(Memphis-37)__AIY60640.1__F-del_DSCav1_mut8 (opt1)
aggagagucccgcagucggcguccagcggcucugcuuguucgugugugugucguugcaggccuuauucaagcuuaccauggagcugcccauccucaagaccaacgccaucaccacgauccuggccgcggugacccugugcuucgccagcucccagaacaucaccgaggaguucuaccagagcacgugcuccgccgucagcaagggcuaccucggggcccugcgcaccggcugguacaccuccgugaucaccaucgagcugagcaacaucaaggagaucaagugcaacgggaccgacgccaaggugaagcucaucaagcaggagcuggacaaguacaagaacgcggucacggaccugcagcuccugaugcaguccaccccggccgccggcagcggguccgccaucgcgagcggcaucgccgugugcaaggugcugcaccucgagggcgaggucaacaagaucaagaacgcccugcuguccaccaacaaggccguggugagccucuccgggugcggcgucagcgugcugaccuucaaggugcuggaccucaagaacuacaucgacaagcagcugcugcccauccucaacaagcaguccugcagcauccccaacaucgagacggucaucgaguuccagcagaagaacaaccggcugcuggagaucacccgcgaguucuccgugaacgccggggugaccacccccgucagcacguacaugcucaccaacuccgagcugcugagccucaucaacgacaugccgaucaccaacgaccagaagaagcugaugagcaacaacgugcagaucgugcggcagcaguccuacagcaucaugugcaucaucaaggaggagguccuggcguacguggugcagcucccccuguacggcgucaucgacacccccugcuggaagcugcacacgagcccccucugcaccaccaacaccaaggagggguccaacaucugccugacgcgcaccgaccggggcugguacugcgacaacgccggcuccgugagcuucuucccgcaggccgagaccugcaaggugcaguccaaccgcgucuucugcgacaccaugaacagccugacgcuccccuccgaggugaaccugugcaacaucgacaucuucaaccccaaguacgacugcaagaucaugaccagcaagaccgacgucuccagcuccgugaucaccagccugggggccaucguguccugcuacggcaagacgaagugcaccgccagcaacaagugccgggggaucaucaagaccuucuccaacggcugcgacuacgucagcaacaagggcguggacaccguguccgucgggaacacgcucuacuacgugaacaagcaggagggccagagccuguacgugaagggggagcccaucaucaacuucuacgacccgcuggucuuccccagcgacgaguucgacgcguccaucagccaggugaacgagaagaucaaccagucccucgccuucauccgcaagagcgacgagcugcugcacaacgugaacgucggcaaguccaccaccaacaucaugaucaccaccaucaucaucgugaucaucgugauccuccugcugcucaucgccgucgggcuguuccuguacugcaaggcccggugaggacuagucccuguucccagagcccacuuuuuuuucuuuuuuugaaauaaaauagccugucuuucagaucucaaaggcucuuuucagagccaccaaaaaaaaaaaaaaaaaaaaaaaaaaaaaaaaaaaaaaaaaaaaaaaaaaaaaaaaaaaaaaaaaaaaaaaaaaaaaaaaaaaaaaaaaaaaaaaaaaaaa

SEQ ID NO: 21552 - RNA, 1820 nt, Artificial Sequence
  mRNA product Design a-1 (hSL-A100) comprising derived and/or modified sequence from HRSV(Memphis-37)__AIY60640.1__F-del_DSCav1_mut8 (opt1)
aggagagucccgcagucggcguccagcggcucugcuuguucgugugugugucguugcaggccuuauucaagcuuaccauggagcugcccauccucaagaccaacgccaucaccacgauccuggccgcggugacccugugcuucgccagcucccagaacaucaccgaggaguucuaccagagcacgugcuccgccgucagcaagggguaccucggggcccugcgcaccggcugguacaccuccgugaucaccaucgagcugagcaacaucaaggagaucaagugcaacgggaccgacgccaaggugaagcucaucaagcaggagcuggacaaguacaagaacgcggucacggaccugcagcuccugaugcaguccaccccggccgccggcagcggguccgccaucgcgagcggcaucgccgugugcaaggugcugcaccucgagggcgaggucaacaagaucaagaacgcccugcuguccaccaacaaggccguggugagccucuccgggugcggcgucagcgugcugaccuucaaggugcuggaccucaagaacuacaucgacaagcagcugcugcccauccucaacaagcaguccugcagcauccccaacaucgagacggucaucgaguuccagcagaagaacaaccggcugcuggagaucacccgcgaguucuccgugaacgccggggugaccacccccgucagcacguacaugcucaccaacuccgagcugcugagccucaucaacgacaugccgaucaccaacgaccagaagaagcugaugagcaacaacgugcagaucgugcggcagcaguccuacagcaucaugugcaucaucaaggaggagguccuggcguacguggugcagcucccccuguacggcgucaucgacacccccugcuggaagcugcacacgagcccccucugcaccaccaacaccaaggagggguccaacaucugccugacgcgcaccgaccggggcugguacugcgacaacgccggcuccgugagcuucuucccgcaggccgagaccugcaaggugcaguccaaccgcgucuucugcgacaccaugaacagccugacgcuccccuccgaggugaaccugugcaacaucgacaucuucaaccccaaguacgacugcaagaucaugaccagcaagaccgacgucuccagcuccgugaucaccagccugggggccaucguguccugcuacggcaagacgaagugcaccgccagcaacaagugccgggggaucaucaagaccuucuccaacggcugcgacuacgucagcaacaagggcguggacaccguguccgucgggaacacgcucuacuacgugaacaagcaggagggccagagccuguacgugaagggggagcccaucaucaacuucuacgacccgcuggucuuccccagcgacgaguucgacgcguccaucagccaggugaacgagaagaucaaccagucccucgccuucauccgcaagagcgacgagcugcugcacaacgugaacgucggcaaguccaccaccaacaucaugaucaccaccaucaucaucgugaucaucgugauccuccugcugcugaucgccgucggccucuuccuguacugcaaggcccggugaggacuagucccuguucccagagcccacuuuuuuuucuuuuuuugaaauaaaauagccugucuuucagaucucaaaggcucuuuucagagccaccaaaaaaaaaaaaaaaaaaaaaaaaaaaaaaaaaaaaaaaaaaaaaaaaaaaaaaaaaaaaaaaaaaaaaaaaaaaaaaaaaaaaaaaaaaaaaaaaaaaaa

SEQ ID NO: 21553 - RNA, 1043 nt, Artificial Sequence; identical to SEQ ID NO: 21481
  mRNA product Design a-1 (hSL-A100) comprising derived and/or modified sequence from HRSV(Memphis-37)__AIY60638.1__M (opt1)

SEQ ID NO: 21554 - RNA, 1043 nt, Artificial Sequence; identical to SEQ ID NO: 21481
  mRNA product Design a-1 (hSL-A100) comprising derived and/or modified sequence from HRSV(Memphis-37)__AIY60638.1__M (opt1)

SEQ ID NO: 21555 - RNA, 1448 nt, Artificial Sequence
  mRNA product Design a-1 (hSL-A100) comprising derived and/or modified sequence from HRSV(Memphis-37)__AIY60635.1__N (opt1)
aggagagucccgcagucggcguccagcggcucugcuuguucgugugugugucguugcaggccuuauucaagcuuaccauggcccugagcaaggugaagcucaacgacacccugaacaaggaccagcugcucuccagcuccaaguacaccauccagcgcagcaccggcgacuccaucgacacccccaacuacgacguccagaagcacaucaacaagcugugcgggaugcugcucaucaccgaggacgccaaccacaaguucaccggcgugaucgggaugcuguacgcgaugagccggcugggccgcgaggacacgaucaagauccuccgggacgccggguaccacgugaaggccaacggcgucgacgugaccacccaccgccaggacaucaacggcaaggagaugaaguucgaggugcugacccuggccucccucacgaccgagauccagaucaacaucgagaucgagagccggaaguccuacaagaagaugcugaaggagaugggggaggucgccccggaguaccgccacgacagccccgacugcggcaugaucauccugugcaucgcggcccucgugaucaccaagcuggccgccggggaccgguccggccugaccgcggugauccgccgggccaacaacguccucaagaacgagaugaagcgcuacaaggggcugcugcccaaggacaucgccaacagcuucuacgagguguucgagaaguacccccacuucaucgacguguucguccacuucggcaucgcccaguccagcacgcggggcgggucccgcguggagggcaucuucgccgggcuguucaugaacgcguacggcgccggccaggugaugcugcgguggggcguccuggccaagagcgugaagaacaucaugcucgggcacgccuccgugcaggccgagauggagcaggucguggagguguacgaguacgcgcagaagcucgggggcgaggccggguucuaccacauccugaacaacccgaaggccagccuccugucccugacccaguucccccacuucagcagcgucgugcucggcaacgccgccggccuggggaucaugggcgaguaccgcgggacgccccggaaccaggaccuguacgacgcggccaaggccuacgccgagcagcucaaggagaacggcgugaucaacuacuccguccuggaccugaccgccgaggagcucgaggcgaucaagcaccagcugaaccccaaggacaacgacguggagcugugaggacuagucccuguucccagagcccacuuuuuuuucuuuuuuugaaauaaaauagccugucuuucagaucucaaaggcucuuuucagagccaccaaaaaaaaaaaaaaaaaaaaaaaaaaaaaaaaaaaaaaaaaaaaaaaaaaaaaaaaaaaaaaaaaaaaaaaaaaaaaaaaaaaaaaaaaaaaaaaaaaaaa

SEQ ID NO: 21556 - RNA, 1448 nt, Artificial Sequence; identical to SEQ ID NO: 21555
  mRNA product Design a-1 (hSL-A100) comprising derived and/or modified sequence from HRSV(Memphis-37)__AIY60635.1__N (opt1)

SEQ ID NO: 21557 - RNA, 998 nt, Artificial Sequence
  mRNA product Design a-1 (hSL-A100) comprising derived and/or modified sequence from HRSV(Memphis-37)__AIY60637.1__P (opt1)
aggagagucccgcagucggcguccagcggcucugcuuguucgugugugugucguugcaggccuuauucaagcuuaccauggagaaguucgcccccgaguuccacggcgaggacgccaacaaccgcgcgaccaaguuccuggagagcaucaaggggaaguucaccuccccgaaggaccccaagaagaaggacagcaucaucuccgugaacagcaucgacaucgaggucacgaaggagucccccaucaccagcaacuccaccaucaucaaccccaccaacgagacggacgacaccgccggcaacaagccgaacuaccagcggaagccccucgugagcuucaaggaggaccccacccccuccgacaacccguucagcaagcuguacaaggagaccaucgagacguucgacaacaacgaggaggaguccagcuacuccuacgaggagaucaacgaccagaccaacgacaacaucaccgcccgccuggaccggaucgacgagaagcucagcgagauccuggggaugcugcacacccucguggucgccuccgccggccccacgagcgcgcgcgacgggauccgggacgccauggugggccugcgcgaggagaugaucgagaagauccggaccgaggcccugaugaccaacgaccgccucgaggccauggcgcggcugcgcaacgaggaguccgagaagauggccaaggacaccagcgacgaggugucccugaaccccacgagcgagaagcucaacaaccugcuggagggcaacgacagcgacaacgaccucucccuggaggacuucugaggacuagucccuguucccagagcccacuuuuuuuucuuuuuuugaaauaaaauagccugucuuucagaucucaaaggcucuuuucagagccaccaaaaaaaaaaaaaaaaaaaaaaaaaaaaaaaaaaaaaaaaaaaaaaaaaaaaaaaaaaaaaaaaaaaaaaaaaaaaaaaaaaaaaaaaaaaaaaaaaaaaa

SEQ ID NO: 21558 - RNA, 998 nt, Artificial Sequence; identical to SEQ ID NO: 21557
  mRNA product Design a-1 (hSL-A100) comprising derived and/or modified sequence from HRSV(Memphis-37)__AIY60637.1__P (opt1)

SEQ ID NO: 21559 - RNA, 857 nt, Artificial Sequence
  mRNA product Design a-1 (hSL-A100) comprising derived and/or modified sequence from HRSV(Memphis-37)__AIY60641.1__M2-1 (opt1)
aggagagucccgcagucggcguccagcggcucugcuuguucgugugugugucguugcaggccuuauucaagcuuaccaugagccgccggaaccccugcaaguucgagauccgcggccacugccugaacgggaagcggugccacuucucccacaacuacuucgaguggccgccccacgcccuccuggugcgccagaacuucaugcugaaccggauccucaagagcauggacaaguccaucgacacccugagcgagaucuccggcgccgcggagcuggaccgcaccgaggaguacgcccucggggucgugggcgugcuggagagcuacaucggguccaucaacaacaucacgaagcagagcgccugcgucgccauguccaagcugcucaccgagcugaacagcgacgacaucaagaagcugcgggacaacgaggagcccaacucccccaagauccgcguguacaacaccgugaucagcuacaucgaguccaaccggaagaacaacaagcagaccauccaccuccugaagcgccugccggccgacguccucaagaagacgaucaagaacacccuggacauccacaagagcaucaccaucaacaaccccaaggaguccaccgugaacgacacgaacgaccacgcgaagaacaacgacaccaccugaggacuagucccuguucccagagcccacuuuuuuuucuuuuuuugaaauaaaauagccugucuuucagaucucaaaggcucuuuucagagccaccaaaaaaaaaaaaaaaaaaaaaaaaaaaaaaaaaaaaaaaaaaaaaaaaaaaaaaaaaaaaaaaaaaaaaaaaaaaaaaaaaaaaaaaaaaaaaaaaaaaaa

SEQ ID NO: 21560 - RNA, 857 nt, Artificial Sequence; identical to SEQ ID NO: 21559
  mRNA product Design a-1 (hSL-A100) comprising derived and/or modified sequence from HRSV(Memphis-37)__AIY60641.1__M2-1 (opt1)

SEQ ID NO: 21561 - RNA, 1973 nt, Artificial Sequence
  mRNA product Design a-1 (A100) comprising derived and/or modified sequence from HRSV(A2)__F0 (opt1)
aggagagucccgcagucggcguccagcggcucugcuuguucgugugugugucguugcaggccuuauucaagcuuaccauggagcugcucauccugaaggccaacgccaucaccaccauccugacggcggugaccuucugcuucgccagcggccagaacaucaccgaggaguucuaccaguccaccugcagcgccgucuccaagggguaccucagcgcccugcggacgggcugguacaccuccgugaucaccaucgagcugagcaacaucaaggagaacaagugcaacgggaccgacgccaaggugaagcucaucaagcaggagcuggacaaguacaagaacgcggucacggagcugcagcuccugaugcaguccaccccggcaaccaacaaccgcgcccggcgcgagcugccccgguucaugaacuacacccucaacaacgccaagaagacgaacgugacccugagcaagaagcgcaagcggcgcuuccugggcuuccuccugggggugggcuccgccaucgcgagcggcgucgccguguccaaggugcugcaccucgagggggaggucaacaagaucaagagcgcccugcuguccaccaacaaggccguggugagccucuccaacggcgucagcgugcugaccuccaaggugcuggaccucaagaacuacaucgacaagcagcugcugcccaucgucaacaagcagagcugcuccaucagcaacaucgagacggugaucgaguuccagcagaagaacaaccggcuccuggagaucacccgcgaguucagcgugaacgccggggucaccacccccguguccacguacaugcugaccaacagcgagcuccugucccugaucaacgacaugccgaucaccaacgaccagaagaagcucaugagcaacaacgugcagaucguccggcagcaguccuacagcaucauguccaucaucaaggaggaggugcuggcguacgugguccagcugccccucuacggcgugaucgacacccccugcuggaagcugcacacgagcccccugugcaccaccaacaccaaggagggguccaacaucugccucacgcgcaccgaccggggcugguacugcgacaacgccggcagcgucuccuucuucccgcaggccgagaccugcaaggugcagagcaaccgcguguucugcgacaccaugaacucccugacgcugcccagcgagguaaaccucugcaacgucgacaucuucaaccccaaguacgacugcaagaucaugaccuccaagaccgacgugagcuccagcgugaucaccucccugggggccaucgucagcugcuacggcaagacgaagugcaccgccagcaacaagaaccgggggaucaucaagaccuucuccaacggcugcgacuacgugagcaacaagggcguggacaccguguccgucgggaacacccuguacuacgugaacaagcaggagggcaagagccucuacgugaagggggagcccaucaucaacuucuacgacccgcuggucuuccccuccgacgaguucgacgcgagcaucucccaggugaacgagaagaucaaccagagccuggccuucauccgcaaguccgacgagcugcuccacaacgugaacgccggcaagagcacgaccaacaucaugaucaccaccaucaucaucgucaucaucgugauccugcugucccucaucgccguggggcugcugcucuacugcaaggcccggagcacgcccgucacccuguccaaggaccagcugagcggcaucaacaacaucgcguucuccaacugaggacuagucccuguucccagagcccacuuuuuuuucuuuuuuugaaauaaaauagccugucuuucagaucuaaaaaaaaaaaaaaaaaaaaaaaaaaaaaaaaaaaaaaaaaaaaaaaaaaaaaaaaaaaaaaaaaaaaaaaaaaaaaaaaaaaaaaaaaaaaaaaaaaaa

SEQ ID NO: 21562 - RNA, 1973 nt, Artificial Sequence
  mRNA product Design a-1 (A100) comprising derived and/or modified sequence from HRSV(A2)__F0 (opt1)
aggagagucccgcagucggcguccagcggcucugcuuguucgugugugugucguugcaggccuuauucaagcuuaccauggagcugcucauccugaaggccaacgccaucaccaccauccugacggcggugaccuucugcuucgccagcggccagaacaucaccgaggaguucuaccaguccacgugcagcgccgucuccaagggguaccucagcgcccugcgcaccggcugguacaccuccgugaucaccaucgagcugagcaacaucaaggagaacaagugcaacgggaccgacgccaaggugaagcucaucaagcaggagcuggacaaguacaagaacgcggucacggagcugcagcuccugaugcaguccacccccgccaccaacaaccgggcccgccgggagcugccgcgcuucaugaacuacacccucaacaacgccaagaagacgaacgugacccugagcaagaagcggaagcgccgguuccugggcuuccuccugggggugggcuccgcgaucgccagcggcgucgccguguccaaggugcugcaccucgagggggaggucaacaagaucaagagcgcccugcuguccaccaacaaggccguggugagccucuccaacggcgucagcgugcugaccuccaaggugcuggaccucaagaacuacaucgacaagcagcugcugcccaucgucaacaagcagagcugcuccaucagcaacaucgagacggugaucgaguuccagcagaagaacaaccgccuccuggagaucacccgggaguucagcgugaacgcgggggucaccacccccguguccacguacaugcugaccaacagcgagcuccugucccugaucaacgacaugcccaucaccaacgaccagaagaagcucaugagcaacaacgugcagaucguccgccagcaguccuacagcaucauguccaucaucaaggaggaggugcuggccuacgugguccagcugccgcucuacggcgugaucgacacccccugcuggaagcugcacacgagcccccugugcaccaccaacaccaaggagggguccaacaucugccucacgcggaccgaccgcggcugguacugcgacaacgccggcagcgucuccuucuucccccaggccgagaccugcaaggugcagagcaaccggguguucugcgacaccaugaacucccugacgcugccgagcgaggucaaccucugcaacguggacaucuucaaccccaaguacgacugcaagaucaugaccuccaagaccgacgugagcuccagcgucaucaccucccugggggccaucgugagcugcuacggcaagacgaagugcaccgcgagcaacaagaaccgcgggaucaucaagaccuucuccaacggcugcgacuacgugagcaacaagggcgucgacaccguguccguggggaacacccuguacuacgucaacaagcaggagggcaagagccucuacgugaagggggagcccaucaucaacuucuacgacccccugguguucccguccgacgaguucgacgccagcaucucccaggucaacgagaagaucaaccagagccuggccuucauccggaaguccgacgagcuccugcacaacgugaacgccggcaagagcacgaccaacaucaugaucaccaccaucaucaucgugaucaucgucauccugcugucccucaucgccguggggcugcugcucuacugcaaggcgcgcagcacgcccgugacccuguccaaggaccagcugagcggcaucaacaacaucgccuucuccaacugaggacuagucccuguucccagagcccacuuuuuuuucuuuuuuugaaauaaaauagccugucuuucagaucuaaaaaaaaaaaaaaaaaaaaaaaaaaaaaaaaaaaaaaaaaaaaaaaaaaaaaaaaaaaaaaaaaaaaaaaaaaaaaaaaaaaaaaaaaaaaaaaaaaaa

SEQ ID NO: 21563 - RNA, 1973 nt, Artificial Sequence
  mRNA product Design a-1 (A100) comprising derived and/or modified sequence from HRSV(A2)__F0 (opt1)
aggagagucccgcagucggcguccagcggcucugcuuguucgugugugugucguugcaggccuuauucaagcuuaccauggagcugcucauccugaaggccaacgccaucaccaccauccugacggcggugaccuucugcuucgccagcggccagaacaucaccgaggaguucuaccaguccacgugcagcgccgucuccaagggguaccucagcgcccugcgcaccggcugguacaccuccgugaucaccaucgagcugagcaacaucaaggagaacaagugcaacgggaccgacgccaaggugaagcucaucaagcaggagcuggacaaguacaagaacgcggucacggagcugcagcuccugaugcaguccacccccgccaccaacaaccgggcccgccgggagcugccgcgcuucaugaacuacacccucaacaacgccaagaagacgaacgugacccugagcaagaagcggaagcgccgguuccugggcuuccuccugggggugggcuccgcgaucgccagcggcgucgccguguccaaggugcugcaccucgagggggaggucaacaagaucaagagcgcccugcuguccaccaacaaggccguggugagccucuccaacggcgucagcgugcugaccuccaaggugcuggaccucaagaacuacaucgacaagcagcugcugcccaucgucaacaagcagagcugcuccaucagcaacaucgagacggugaucgaguuccagcagaagaacaaccgccuccuggagaucacccgggaguucagcgugaacgcgggggucaccacccccguguccacguacaugcugaccaacagcgagcuccugucccugaucaacgacaugcccaucaccaacgaccagaagaagcucaugagcaacaacgugcagaucguccgccagcaguccuacagcaucauguccaucaucaaggaggaggugcuggccuacgugguccagcugccgcucuacggcgugaucgacacccccugcuggaagcugcacacgagcccccugugcaccaccaacaccaaggagggguccaacaucugccucacgcggaccgaccgcggcugguacugcgacaacgccggcagcgucuccuucuucccccaggccgagaccugcaaggugcagagcaaccggguguucugcgacaccaugaacucccugacgcugccgagcgaggucaaccucugcaacguggacaucuucaaccccaaguacgacugcaagaucaugaccuccaagaccgacgugagcuccagcgucaucaccucccugggggccaucgugagcugcuacggcaagacgaagugcaccgcgagcaacaagaaccgcgggaucaucaagaccuucuccaacggcugcgacuacgugagcaacaagggcgucgacaccguguccguggggaacacccuguacuacgucaacaagcaggagggcaagagccucuacgugaagggggagcccaucaucaacuucuacgacccccugguguucccguccgacgaguucgacgccagcaucucccaggucaacgagaagaucaaccagagccuggccuucauccggaaguccgacgagcugcuccacaacgugaacgccggcaagagcacgaccaacaucaugaucaccaccaucaucaucgugaucaucgucauccugcugucccucaucgccguggggcugcugcucuacugcaaggcgcgcagcacgcccgugacccuguccaaggaccagcugagcggcaucaacaacaucgccuucuccaacugaggacuagucccuguucccagagcccacuuuuuuuucuuuuuuugaaauaaaauagccugucuuucagaucuaaaaaaaaaaaaaaaaaaaaaaaaaaaaaaaaaaaaaaaaaaaaaaaaaaaaaaaaaaaaaaaaaaaaaaaaaaaaaaaaaaaaaaaaaaaaaaaaaaaa

SEQ ID NO: 21564 - RNA, 1910 nt, Artificial Sequence
  mRNA product Design a-1 (A100) comprising derived and/or modified sequence from HRSV(A2)__F-del (opt1)
aggagagucccgcagucggcguccagcggcucugcuuguucgugugugugucguugcaggccuuauucaagcuuaccauggagcugcucauccugaaggccaacgccaucaccaccauccugacggcggugaccuucugcuucgccagcggccagaacaucaccgaggaguucuaccaguccaccugcagcgccgucuccaagggguaccucagcgcccugcggacgggcugguacaccuccgugaucaccaucgagcugagcaacaucaaggagaacaagugcaacgggaccgacgccaaggugaagcucaucaagcaggagcuggacaaguacaagaacgcggucacggagcugcagcuccugaugcaguccaccccggcaaccaacaaccgcgcccggcgcgagcugccccgguucaugaacuacacccucaacaacgccaagaagacgaacgugacccugagcaagaagcgcaagcggcgcuuccugggcuuccuccugggggugggcuccgccaucgcgagcggcgucgccguguccaaggugcugcaccucgagggggaggucaacaagaucaagagcgcccugcuguccaccaacaaggccguggugagccucuccaacggcgucagcgugcugaccuccaaggugcuggaccucaagaacuacaucgacaagcagcugcugcccaucgucaacaagcagagcugcuccaucagcaacaucgagacggugaucgaguuccagcagaagaacaaccggcuccuggagaucacccgcgaguucagcgugaacgccggggucaccacccccguguccacguacaugcugaccaacagcgagcuccugucccugaucaacgacaugccgaucaccaacgaccagaagaagcucaugagcaacaacgugcagaucguccggcagcaguccuacagcaucauguccaucaucaaggaggaggugcuggcguacgugguccagcugccccucuacggcgugaucgacacccccugcuggaagcugcacacgagcccccugugcaccaccaacaccaaggagggguccaacaucugccucacgcgcaccgaccggggcugguacugcgacaacgccggcagcgucuccuucuucccgcaggccgagaccugcaaggugcagagcaaccgcguguucugcgacaccaugaacucccugacgcugcccagcgagguaaaccucugcaacgucgacaucuucaaccccaaguacgacugcaagaucaugaccuccaagaccgacgugagcuccagcgugaucaccucccugggggccaucgucagcugcuacggcaagacgaagugcaccgccagcaacaagaaccgggggaucaucaagaccuucuccaacggcugcgacuacgugagcaacaagggcguggacaccguguccgucgggaacacccuguacuacgugaacaagcaggagggcaagagccucuacgugaagggggagcccaucaucaacuucuacgacccgcuggucuuccccuccgacgaguucgacgcgagcaucucccaggugaacgagaagaucaaccagagccuggccuucauccgcaaguccgacgagcugcuccacaacgugaacgccggcaagagcacgaccaacaucaugaucaccaccaucaucaucgucaucaucgugauccugcugucccucaucgccguggggcugcugcucuacugcaaggcccggugaggacuagucccuguucccagagcccacuuuuuuuucuuuuuuugaaauaaaauagccugucuuucagaucuaaaaaaaaaaaaaaaaaaaaaaaaaaaaaaaaaaaaaaaaaaaaaaaaaaaaaaaaaaaaaaaaaaaaaaaaaaaaaaaaaaaaaaaaaaaaaaaaaaaa

SEQ ID NO: 21565 - RNA, 1910 nt, Artificial Sequence
  mRNA product Design a-1 (A100) comprising derived and/or modified sequence from HRSV(A2)__F-del (opt1)
aggagagucccgcagucggcguccagcggcucugcuuguucgugugugugucguugcaggccuuauucaagcuuaccauggagcugcucauccugaaggccaacgccaucaccaccauccugacggcggugaccuucugcuucgccagcggccagaacaucaccgaggaguucuaccaguccacgugcagcgccgucuccaagggguaccucagcgcccugcgcaccggcugguacaccuccgugaucaccaucgagcugagcaacaucaaggagaacaagugcaacgggaccgacgccaaggugaagcucaucaagcaggagcuggacaaguacaagaacgcggucacggagcugcagcuccugaugcaguccacccccgccaccaacaaccgggcccgccgggagcugccgcgcuucaugaacuacacccucaacaacgccaagaagacgaacgugacccugagcaagaagcggaagcgccgguuccugggcuuccuccugggggugggcuccgcgaucgccagcggcgucgccguguccaaggugcugcaccucgagggggaggucaacaagaucaagagcgcccugcuguccaccaacaaggccguggugagccucuccaacggcgucagcgugcugaccuccaaggugcuggaccucaagaacuacaucgacaagcagcugcugcccaucgucaacaagcagagcugcuccaucagcaacaucgagacggugaucgaguuccagcagaagaacaaccgccuccuggagaucacccgggaguucagcgugaacgcgggggucaccacccccguguccacguacaugcugaccaacagcgagcuccugucccugaucaacgacaugcccaucaccaacgaccagaagaagcucaugagcaacaacgugcagaucguccgccagcaguccuacagcaucauguccaucaucaaggaggaggugcuggccuacgugguccagcugccgcucuacggcgugaucgacacccccugcuggaagcugcacacgagcccccugugcaccaccaacaccaaggagggguccaacaucugccucacgcggaccgaccgcggcugguacugcgacaacgccggcagcgucuccuucuucccccaggccgagaccugcaaggugcagagcaaccggguguucugcgacaccaugaacucccugacgcugccgagcgaggucaaccucugcaacguggacaucuucaaccccaaguacgacugcaagaucaugaccuccaagaccgacgugagcuccagcgucaucaccucccugggggccaucgugagcugcuacggcaagacgaagugcaccgcgagcaacaagaaccgcgggaucaucaagaccuucuccaacggcugcgacuacgugagcaacaagggcgucgacaccguguccguggggaacacccuguacuacgucaacaagcaggagggcaagagccucuacgugaagggggagcccaucaucaacuucuacgacccccugguguucccguccgacgaguucgacgccagcaucucccaggucaacgagaagaucaaccagagccuggccuucauccggaaguccgacgagcuccugcacaacgugaacgccggcaagagcacgaccaacaucaugaucaccaccaucaucaucgugaucaucgucauccugcugucccucaucgccguggggcugcugcucuacugcaaggcgcgcugaggacuagucccuguucccagagcccacuuuuuuuucuuuuuuugaaauaaaauagccugucuuucagaucuaaaaaaaaaaaaaaaaaaaaaaaaaaaaaaaaaaaaaaaaaaaaaaaaaaaaaaaaaaaaaaaaaaaaaaaaaaaaaaaaaaaaaaaaaaaaaaaaaaaa

SEQ ID NO: 21566 - RNA, 1910 nt, Artificial Sequence
  mRNA product Design a-1 (A100) comprising derived and/or modified sequence from HRSV(A2)__F-del (opt1)
aggagagucccgcagucggcguccagcggcucugcuuguucgugugugugucguugcaggccuuauucaagcuuaccauggagcugcucauccugaaggccaacgccaucaccaccauccugacggcggugaccuucugcuucgccagcggccagaacaucaccgaggaguucuaccaguccacgugcagcgccgucuccaagggguaccucagcgcccugcgcaccggcugguacaccuccgugaucaccaucgagcugagcaacaucaaggagaacaagugcaacgggaccgacgccaaggugaagcucaucaagcaggagcuggacaaguacaagaacgcggucacggagcugcagcuccugaugcaguccacccccgccaccaacaaccgggcccgccgggagcugccgcgcuucaugaacuacacccucaacaacgccaagaagacgaacgugacccugagcaagaagcggaagcgccgguuccugggcuuccuccugggggugggcuccgcgaucgccagcggcgucgccguguccaaggugcugcaccucgagggggaggucaacaagaucaagagcgcccugcuguccaccaacaaggccguggugagccucuccaacggcgucagcgugcugaccuccaaggugcuggaccucaagaacuacaucgacaagcagcugcugcccaucgucaacaagcagagcugcuccaucagcaacaucgagacggugaucgaguuccagcagaagaacaaccgccuccuggagaucacccgggaguucagcgugaacgcgggggucaccacccccguguccacguacaugcugaccaacagcgagcuccugucccugaucaacgacaugcccaucaccaacgaccagaagaagcucaugagcaacaacgugcagaucguccgccagcaguccuacagcaucauguccaucaucaaggaggaggugcuggccuacgugguccagcugccgcucuacggcgugaucgacacccccugcuggaagcugcacacgagcccccugugcaccaccaacaccaaggagggguccaacaucugccucacgcggaccgaccgcggcugguacugcgacaacgccggcagcgucuccuucuucccccaggccgagaccugcaaggugcagagcaaccggguguucugcgacaccaugaacucccugacgcugccgagcgaggucaaccucugcaacguggacaucuucaaccccaaguacgacugcaagaucaugaccuccaagaccgacgugagcuccagcgucaucaccucccugggggccaucgugagcugcuacggcaagacgaagugcaccgcgagcaacaagaaccgcgggaucaucaagaccuucuccaacggcugcgacuacgugagcaacaagggcgucgacaccguguccguggggaacacccuguacuacgucaacaagcaggagggcaagagccucuacgugaagggggagcccaucaucaacuucuacgacccccugguguucccguccgacgaguucgacgccagcaucucccaggucaacgagaagaucaaccagagccuggccuucauccggaaguccgacgagcugcuccacaacgugaacgccggcaagagcacgaccaacaucaugaucaccaccaucaucaucgugaucaucgucauccugcugucccucaucgccguggggcugcugcucuacugcaaggcgcgcugaggacuagucccuguucccagagcccacuuuuuuuucuuuuuuugaaauaaaauagccugucuuucagaucuaaaaaaaaaaaaaaaaaaaaaaaaaaaaaaaaaaaaaaaaaaaaaaaaaaaaaaaaaaaaaaaaaaaaaaaaaaaaaaaaaaaaaaaaaaaaaaaaaaaa

SEQ ID NO: 21567 - RNA, 1973 nt, Artificial Sequence
  mRNA product Design a-1 (A100) comprising derived and/or modified sequence from HRSV(A2)__F0_DSCav1 (opt1)
aggagagucccgcagucggcguccagcggcucugcuuguucgugugugugucguugcaggccuuauucaagcuuaccauggagcugcucauccugaaggccaacgccaucaccaccauccugacggcggugaccuucugcuucgccagcggccagaacaucaccgaggaguucuaccaguccacgugcagcgccgucuccaagggguaccucagcgcccugcggaccggcugguacaccuccgugaucaccaucgagcugagcaacaucaaggagaacaagugcaacgggaccgacgccaaggugaagcucaucaagcaggagcuggacaaguacaagaacgcggucacggagcugcagcuccugaugcaguccaccccggcaaccaacaaccgcgcccggcgcgagcugccccgguucaugaacuacacccucaacaacgccaagaagacgaacgugacccugagcaagaagcgcaagcggcgcuuccugggcuuccuccugggggugggcuccgccaucgcgagcggcgucgccgugugcaaggugcugcaccucgagggggaggucaacaagaucaagagcgcccugcuguccaccaacaaggccguggugagccucuccaacggcgucagcgugcugaccuucaaggugcuggaccucaagaacuacaucgacaagcagcugcugcccauccugaacaagcagagcugcuccaucagcaacaucgagacggugaucgaguuccagcagaagaacaaccggcuccuggagaucacccgcgaguucagcgugaacgccggggucaccacccccguguccacguacaugcugaccaacagcgagcuccugucccugaucaacgacaugccgaucaccaacgaccagaagaagcucaugagcaacaacgugcagaucguccggcagcaguccuacagcaucaugugcaucaucaaggaggaggugcuggcguacgugguccagcugccccucuacggcgugaucgacacccccugcuggaagcugcacacgagcccccugugcaccaccaacaccaaggagggguccaacaucugccucacgcgcaccgaccggggcugguacugcgacaacgccggcagcgucuccuucuucccgcaggccgagaccugcaaggugcagagcaaccgcguguucugcgacaccaugaacucccugacgcugcccagcgagguaaaccucugcaacgucgacaucuucaaccccaaguacgacugcaagaucaugaccuccaagaccgacgugagcuccagcgugaucaccucccugggggccaucgucagcugcuacggcaagacgaagugcaccgccagcaacaagaaccgggggaucaucaagaccuucuccaacggcugcgacuacgugagcaacaagggcguggacaccguguccgucgggaacacccuguacuacgugaacaagcaggagggcaagagccucuacgugaagggggagcccaucaucaacuucuacgacccgcuggucuuccccuccgacgaguucgacgcgagcaucucccaggugaacgagaagaucaaccagagccuggccuucauccgcaaguccgacgagcugcuccacaacgugaacgccggcaagagcacgaccaacaucaugaucaccaccaucaucaucgucaucaucgugauccugcugucccucaucgccguggggcugcugcucuacugcaaggcccggagcacgcccgucacccuguccaaggaccagcugagcggcaucaacaacaucgcguucuccaacugaggacuagucccuguucccagagcccacuuuuuuuucuuuuuuugaaauaaaauagccugucuuucagaucuaaaaaaaaaaaaaaaaaaaaaaaaaaaaaaaaaaaaaaaaaaaaaaaaaaaaaaaaaaaaaaaaaaaaaaaaaaaaaaaaaaaaaaaaaaaaaaaaaaaa

SEQ ID NO: 21568 - RNA, 1973 nt, Artificial Sequence
  mRNA product Design a-1 (A100) comprising derived and/or modified sequence from HRSV(A2)__F0_DSCav1 (opt1)
aggagagucccgcagucggcguccagcggcucugcuuguucgugugugugucguugcaggccuuauucaagcuuaccauggagcugcucauccugaaggccaacgccaucaccaccauccugacggcggugaccuucugcuucgccagcggccagaacaucaccgaggaguucuaccaguccacgugcagcgccgucuccaagggguaccucagcgcccugcgcaccggcugguacaccuccgugaucaccaucgagcugagcaacaucaaggagaacaagugcaacgggaccgacgccaaggugaagcucaucaagcaggagcuggacaaguacaagaacgcggucacggagcugcagcuccugaugcaguccacccccgccaccaacaaccgggcccgccgggagcugccgcgcuucaugaacuacacccucaacaacgccaagaagacgaacgugacccugagcaagaagcggaagcgccgguuccugggcuuccuccugggggugggcuccgcgaucgccagcggcgucgccgugugcaaggugcugcaccucgagggggaggucaacaagaucaaguccgcccugcugagcaccaacaaggccguggugucccucagcaacggcgucuccgugcugaccuucaaggugcuggaccucaagaacuacaucgacaagcagcugcugcccauccucaacaagcagagcugcuccaucagcaacaucgagacggucaucgaguuccagcagaagaacaaccgccugcuggagaucacccgggaguucuccgugaacgcgggggugaccacccccgucagcacguacaugcucaccaacagcgagcugcugucccucaucaacgacaugcccaucaccaacgaccagaagaagcugaugagcaacaacgugcagaucgugcgccagcaguccuacagcaucaugugcaucaucaaggaggagguccuggccuacguggugcagcucccgcuguacggcgucaucgacacccccugcuggaagcugcacacgagcccccucugcaccaccaacaccaaggaggggagcaacaucugccugacgcggaccgaccgcggcugguacugcgacaacgccggcuccgugagcuucuucccccaggccgagaccugcaagguccaguccaaccggguguucugcgacaccaugaacagccugacgcucccguccgaggugaaccugugcaacgucgacaucuucaaccccaaguacgacugcaagaucaugaccagcaagaccgacguguccagcuccgugaucaccagccugggggccaucgucuccugcuacggcaagacgaagugcaccgcgagcaacaagaaccgcgggaucaucaagaccuucuccaacggcugcgacuacgugagcaacaagggcguggacaccgucagcguggggaacacccucuacuacgugaacaagcaggagggcaagucccuguacgucaagggggagcccaucaucaacuucuacgacccccugguguucccgagcgacgaguucgacgccuccaucagccaggugaacgagaagaucaaccagucccucgccuucauccggaaguccgacgagcugcugcacaacgucaacgccggcaaguccacgaccaacaucaugaucaccaccaucaucaucgugaucaucgugauccugcucagccugaucgccgucgggcugcuccuguacugcaaggcgcgcuccacgcccgugacccugagcaaggaccagcucuccggcaucaacaacaucgccuucagcaacugaggacuagucccuguucccagagcccacuuuuuuuucuuuuuuugaaauaaaauagccugucuuucagaucuaaaaaaaaaaaaaaaaaaaaaaaaaaaaaaaaaaaaaaaaaaaaaaaaaaaaaaaaaaaaaaaaaaaaaaaaaaaaaaaaaaaaaaaaaaaaaaaaaaaa

SEQ ID NO: 21569 - RNA, 1973 nt, Artificial Sequence
  mRNA product Design a-1 (A100) comprising derived and/or modified sequence from HRSV(A2)__F0_DSCav1 (opt1)
aggagagucccgcagucggcguccagcggcucugcuuguucgugugugugucguugcaggccuuauucaagcuuaccauggagcugcucauccugaaggccaacgccaucaccaccauccugacggcggugaccuucugcuucgccagcggccagaacaucaccgaggaguucuaccaguccacgugcagcgccgucuccaagggguaccucagcgcccugcgcaccggcugguacaccuccgugaucaccaucgagcugagcaacaucaaggagaacaagugcaacgggaccgacgccaaggugaagcucaucaagcaggagcuggacaaguacaagaacgcggucacggagcugcagcuccugaugcaguccacccccgccaccaacaaccgggcccgccgggagcugccgcgcuucaugaacuacacccucaacaacgccaagaagacgaacgugacccugagcaagaagcggaagcgccgguuccugggcuuccuccugggggugggcuccgcgaucgccagcggcgucgccgugugcaaggugcugcaccucgagggggaggucaacaagaucaaguccgcccugcugagcaccaacaaggccguggugucccucagcaacggcgucuccgugcugaccuucaaggugcuggaccucaagaacuacaucgacaagcagcugcugcccauccucaacaagcagagcugcuccaucagcaacaucgagacggucaucgaguuccagcagaagaacaaccgccugcuggagaucacccgggaguucuccgugaacgcgggggugaccacccccgucagcacguacaugcucaccaacagcgagcugcugucccucaucaacgacaugcccaucaccaacgaccagaagaagcugaugagcaacaacgugcagaucgugcgccagcaguccuacagcaucaugugcaucaucaaggaggagguccuggccuacguggugcagcucccgcuguacggcgucaucgacacccccugcuggaagcugcacacgagcccccucugcaccaccaacaccaaggaggggagcaacaucugccugacgcggaccgaccgcggcugguacugcgacaacgccggcuccgugagcuucuucccccaggccgagaccugcaagguccaguccaaccggguguucugcgacaccaugaacagccugacgcucccguccgaggugaaccugugcaacgucgacaucuucaaccccaaguacgacugcaagaucaugaccagcaagaccgacguguccagcuccgugaucaccagccugggggccaucgucuccugcuacggcaagacgaagugcaccgcgagcaacaagaaccgcgggaucaucaagaccuucuccaacggcugcgacuacgugagcaacaagggcguggacaccgucagcguggggaacacccucuacuacgugaacaagcaggagggcaagucccuguacgucaagggggagcccaucaucaacuucuacgacccccugguguucccgagcgacgaguucgacgccuccaucagccaggugaacgagaagaucaaccagucccuggccuucauccggaaguccgacgagcuccugcacaacgucaacgccggcaaguccacgaccaacaucaugaucaccaccaucaucaucgugaucaucgugauccugcucagccugaucgccgucgggcugcuccuguacugcaaggcgcgcuccacgcccgugacccugagcaaggaccagcucuccggcaucaacaacaucgccuucagcaacugaggacuagucccuguucccagagcccacuuuuuuuucuuuuuuugaaauaaaauagccugucuuucagaucuaaaaaaaaaaaaaaaaaaaaaaaaaaaaaaaaaaaaaaaaaaaaaaaaaaaaaaaaaaaaaaaaaaaaaaaaaaaaaaaaaaaaaaaaaaaaaaaaaaaa

SEQ ID NO: 21570 - RNA, 1910 nt, Artificial Sequence
  mRNA product Design a-1 (A100) comprising derived and/or modified sequence from HRSV(A2)__F-del_DSCav1 (opt1)
aggagagucccgcagucggcguccagcggcucugcuuguucgugugugugucguugcaggccuuauucaagcuuaccauggagcugcucauccugaaggccaacgccaucaccaccauccugacggcggugaccuucugcuucgccagcggccagaacaucaccgaggaguucuaccaguccacgugcagcgccgucuccaagggguaccucagcgcccugcggaccggcugguacaccuccgugaucaccaucgagcugagcaacaucaaggagaacaagugcaacgggaccgacgccaaggugaagcucaucaagcaggagcuggacaaguacaagaacgcggucacggagcugcagcuccugaugcaguccaccccggcaaccaacaaccgcgcccggcgcgagcugccccgguucaugaacuacacccucaacaacgccaagaagacgaacgugacccugagcaagaagcgcaagcggcgcuuccugggcuuccuccugggggugggcuccgccaucgcgagcggcgucgccgugugcaaggugcugcaccucgagggggaggucaacaagaucaagagcgcccugcuguccaccaacaaggccguggugagccucuccaacggcgucagcgugcugaccuucaaggugcuggaccucaagaacuacaucgacaagcagcugcugcccauccugaacaagcagagcugcuccaucagcaacaucgagacggugaucgaguuccagcagaagaacaaccggcuccuggagaucacccgcgaguucagcgugaacgccggggucaccacccccguguccacguacaugcugaccaacagcgagcuccugucccugaucaacgacaugccgaucaccaacgaccagaagaagcucaugagcaacaacgugcagaucguccggcagcaguccuacagcaucaugugcaucaucaaggaggaggugcuggcguacgugguccagcugccccucuacggcgugaucgacacccccugcuggaagcugcacacgagcccccugugcaccaccaacaccaaggagggguccaacaucugccucacgcgcaccgaccggggcugguacugcgacaacgccggcagcgucuccuucuucccgcaggccgagaccugcaaggugcagagcaaccgcguguucugcgacaccaugaacucccugacgcugcccagcgagguaaaccucugcaacgucgacaucuucaaccccaaguacgacugcaagaucaugaccuccaagaccgacgugagcuccagcgugaucaccucccugggggccaucgucagcugcuacggcaagacgaagugcaccgccagcaacaagaaccgggggaucaucaagaccuucuccaacggcugcgacuacgugagcaacaagggcguggacaccguguccgucgggaacacccuguacuacgugaacaagcaggagggcaagagccucuacgugaagggggagcccaucaucaacuucuacgacccgcuggucuuccccuccgacgaguucgacgcgagcaucucccaggugaacgagaagaucaaccagagccuggccuucauccgcaaguccgacgagcugcuccacaacgugaacgccggcaagagcacgaccaacaucaugaucaccaccaucaucaucgucaucaucgugauccugcugucccucaucgccguggggcugcugcucuacugcaaggcccggugaggacuagucccuguucccagagcccacuuuuuuuucuuuuuuugaaauaaaauagccugucuuucagaucuaaaaaaaaaaaaaaaaaaaaaaaaaaaaaaaaaaaaaaaaaaaaaaaaaaaaaaaaaaaaaaaaaaaaaaaaaaaaaaaaaaaaaaaaaaaaaaaaaaaa

SEQ ID NO: 21571 - RNA, 1910 nt, Artificial Sequence
  mRNA product Design a-1 (A100) comprising derived and/or modified sequence from HRSV(A2)__F-del_DSCav1 (opt1)
aggagagucccgcagucggcguccagcggcucugcuuguucgugugugugucguugcaggccuuauucaagcuuaccauggagcugcucauccugaaggccaacgccaucaccaccauccugacggcggugaccuucugcuucgccagcggccagaacaucaccgaggaguucuaccaguccacgugcagcgccgucuccaagggguaccucagcgcccugcgcaccggcugguacaccuccgugaucaccaucgagcugagcaacaucaaggagaacaagugcaacgggaccgacgccaaggugaagcucaucaagcaggagcuggacaaguacaagaacgcggucacggagcugcagcuccugaugcaguccacccccgccaccaacaaccgggcccgccgggagcugccgcgcuucaugaacuacacccucaacaacgccaagaagacgaacgugacccugagcaagaagcggaagcgccgguuccugggcuuccuccugggggugggcuccgcgaucgccagcggcgucgccgugugcaaggugcugcaccucgagggggaggucaacaagaucaaguccgcccugcugagcaccaacaaggccguggugucccucagcaacggcgucuccgugcugaccuucaaggugcuggaccucaagaacuacaucgacaagcagcugcugcccauccucaacaagcagagcugcuccaucagcaacaucgagacggucaucgaguuccagcagaagaacaaccgccugcuggagaucacccgggaguucuccgugaacgcgggggugaccacccccgucagcacguacaugcucaccaacagcgagcugcugucccucaucaacgacaugcccaucaccaacgaccagaagaagcugaugagcaacaacgugcagaucgugcgccagcaguccuacagcaucaugugcaucaucaaggaggagguccuggccuacguggugcagcucccgcuguacggcgucaucgacacccccugcuggaagcugcacacgagcccccucugcaccaccaacaccaaggaggggagcaacaucugccugacgcggaccgaccgcggcugguacugcgacaacgccggcuccgugagcuucuucccccaggccgagaccugcaagguccaguccaaccggguguucugcgacaccaugaacagccugacgcucccguccgaggugaaccugugcaacgucgacaucuucaaccccaaguacgacugcaagaucaugaccagcaagaccgacguguccagcuccgugaucaccagccugggggccaucgucuccugcuacggcaagacgaagugcaccgcgagcaacaagaaccgcgggaucaucaagaccuucuccaacggcugcgacuacgugagcaacaagggcguggacaccgucagcguggggaacacccucuacuacgugaacaagcaggagggcaagucccuguacgucaagggggagcccaucaucaacuucuacgacccccugguguucccgagcgacgaguucgacgccuccaucagccaggugaacgagaagaucaaccagucccucgccuucauccggaaguccgacgagcugcugcacaacgucaacgccggcaaguccacgaccaacaucaugaucaccaccaucaucaucgugaucaucgugauccugcucagccugaucgccgucgggcugcuccuguacugcaaggcgcgcugaggacuagucccuguucccagagcccacuuuuuuuucuuuuuuugaaauaaaauagccugucuuucagaucuaaaaaaaaaaaaaaaaaaaaaaaaaaaaaaaaaaaaaaaaaaaaaaaaaaaaaaaaaaaaaaaaaaaaaaaaaaaaaaaaaaaaaaaaaaaaaaaaaaaa

SEQ ID NO: 21572 - RNA, 1910 nt, Artificial Sequence
  mRNA product Design a-1 (A100) comprising derived and/or modified sequence from HRSV(A2)__F-del_DSCav1 (opt1)
aggagagucccgcagucggcguccagcggcucugcuuguucgugugugugucguugcaggccuuauucaagcuuaccauggagcugcucauccugaaggccaacgccaucaccaccauccugacggcggugaccuucugcuucgccagcggccagaacaucaccgaggaguucuaccaguccacgugcagcgccgucuccaagggguaccucagcgcccugcgcaccggcugguacaccuccgugaucaccaucgagcugagcaacaucaaggagaacaagugcaacgggaccgacgccaaggugaagcucaucaagcaggagcuggacaaguacaagaacgcggucacggagcugcagcuccugaugcaguccacccccgccaccaacaaccgggcccgccgggagcugccgcgcuucaugaacuacacccucaacaacgccaagaagacgaacgugacccugagcaagaagcggaagcgccgguuccugggcuuccuccugggggugggcuccgcgaucgccagcggcgucgccgugugcaaggugcugcaccucgagggggaggucaacaagaucaaguccgcccugcugagcaccaacaaggccguggugucccucagcaacggcgucuccgugcugaccuucaaggugcuggaccucaagaacuacaucgacaagcagcugcugcccauccucaacaagcagagcugcuccaucagcaacaucgagacggucaucgaguuccagcagaagaacaaccgccugcuggagaucacccgggaguucuccgugaacgcgggggugaccacccccgucagcacguacaugcucaccaacagcgagcugcugucccucaucaacgacaugcccaucaccaacgaccagaagaagcugaugagcaacaacgugcagaucgugcgccagcaguccuacagcaucaugugcaucaucaaggaggagguccuggccuacguggugcagcucccgcuguacggcgucaucgacacccccugcuggaagcugcacacgagcccccucugcaccaccaacaccaaggaggggagcaacaucugccugacgcggaccgaccgcggcugguacugcgacaacgccggcuccgugagcuucuucccccaggccgagaccugcaagguccaguccaaccggguguucugcgacaccaugaacagccugacgcucccguccgaggugaaccugugcaacgucgacaucuucaaccccaaguacgacugcaagaucaugaccagcaagaccgacguguccagcuccgugaucaccagccugggggccaucgucuccugcuacggcaagacgaagugcaccgcgagcaacaagaaccgcgggaucaucaagaccuucuccaacggcugcgacuacgugagcaacaagggcguggacaccgucagcguggggaacacccucuacuacgugaacaagcaggagggcaagucccuguacgucaagggggagcccaucaucaacuucuacgacccccugguguucccgagcgacgaguucgacgccuccaucagccaggugaacgagaagaucaaccagucccuggccuucauccggaaguccgacgagcuccugcacaacgucaacgccggcaaguccacgaccaacaucaugaucaccaccaucaucaucgugaucaucgugauccugcucagccugaucgccgucgggcugcuccuguacugcaaggcgcgcugaggacuagucccuguucccagagcccacuuuuuuuucuuuuuuugaaauaaaauagccugucuuucagaucuaaaaaaaaaaaaaaaaaaaaaaaaaaaaaaaaaaaaaaaaaaaaaaaaaaaaaaaaaaaaaaaaaaaaaaaaaaaaaaaaaaaaaaaaaaaaaaaaaaaa

SEQ ID NO: 21573 - RNA, 1856 nt, Artificial Sequence
  mRNA product Design a-1 (A100) comprising derived and/or modified sequence from HRSV(A2)__F_DSCav1_mut0 (opt1)
aggagagucccgcagucggcguccagcggcucugcuuguucgugugugugucguugcaggccuuauucaagcuuaccauggagcugcucauccugaaggccaacgccaucaccaccauccugacggcggugaccuucugcuucgccagcggccagaacaucaccgaggaguucuaccaguccacgugcagcgccgucuccaagggguaccucagcgcccugcggaccggcugguacaccuccgugaucaccaucgagcugagcaacaucaaggagaacaagugcaacgggaccgacgccaaggugaagcucaucaagcaggagcuggacaaguacaagaacgcggucacggagcugcagcuccugaugcaguccaccccggcaaccggcuccggcuccgccaucgcgagcggcgucgccgugugcaaggugcugcaccucgagggggaggucaacaagaucaagagcgcccugcuguccaccaacaaggccguggugagccucuccaacggcgucagcgugcugaccuucaaggugcuggaccucaagaacuacaucgacaagcagcugcugcccauccugaacaagcagagcugcuccaucagcaacaucgagacggugaucgaguuccagcagaagaacaaccggcuccuggagaucacccgcgaguucagcgugaacgccggggucaccacccccguguccacguacaugcugaccaacagcgagcuccugucccugaucaacgacaugccgaucaccaacgaccagaagaagcucaugagcaacaacgugcagaucguccggcagcaguccuacagcaucaugugcaucaucaaggaggaggugcuggcguacgugguccagcugccccucuacggcgugaucgacacccccugcuggaagcugcacacgagcccccugugcaccaccaacaccaaggagggguccaacaucugccucacgcgcaccgaccggggcugguacugcgacaacgccggcagcgucuccuucuucccgcaggccgagaccugcaaggugcagagcaaccgcguguucugcgacaccaugaacucccggacgcugcccagcgagguaaaccucugcaacgucgacaucuucaaccccaaguacgacugcaagaucaugaccuccaagaccgacgugagcuccagcgugaucaccucccugggggccaucgucagcugcuacggcaagacgaagugcaccgccagcaacaagaaccgggggaucaucaagaccuucuccaacggcugcgacuacgugagcaacaagggcguggacaccguguccgucgggaacacccuguacuacgugaacaagcaggagggcaagagccucuacgugaagggggagcccaucaucaacuucuacgacccgcuggucuuccccuccgacgaguucgacgcgagcaucucccaggugaacgagaagaucaaccagagccuggccuucauccgcaaguccgacgagcugcuccacaacgugaacgccggcaagagcacgaccaacaucaugaucaccaccaucaucaucgucaucaucgugauccugcugucccucaucgccguggggcugcugcucuacugcaaggcccggagcacgcccgucacccuguccaaggaccagcugagcggcaucaacaacaucgcguucuccaacugaggacuagucccuguucccagagcccacuuuuuuuucuuuuuuugaaauaaaauagccugucuuucagaucuaaaaaaaaaaaaaaaaaaaaaaaaaaaaaaaaaaaaaaaaaaaaaaaaaaaaaaaaaaaaaaaaaaaaaaaaaaaaaaaaaaaaaaaaaaaaaaaaaaaa

SEQ ID NO: 21574 - RNA, 1856 nt, Artificial Sequence
  mRNA product Design a-1 (A100) comprising derived and/or modified sequence from HRSV(A2)__F_DSCav1_mut0 (opt1)
aggagagucccgcagucggcguccagcggcucugcuuguucgugugugugucguugcaggccuuauucaagcuuaccauggagcugcucauccugaaggccaacgccaucaccaccauccugacggcggugaccuucugcuucgccagcggccagaacaucaccgaggaguucuaccaguccacgugcagcgccgucuccaagggguaccucagcgcccugcgcaccggcugguacaccuccgugaucaccaucgagcugagcaacaucaaggagaacaagugcaacgggaccgacgccaaggugaagcucaucaagcaggagcuggacaaguacaagaacgcggucacggagcugcagcuccugaugcaguccacccccgccaccggcagcggguccgccaucgccagcggcguggcggugugcaagguccugcaccucgagggcgaggugaacaagaucaaguccgcccugcugagcaccaacaaggccguggucucccucagcaacgggguguccgugcugacguucaagguccuggaccucaagaacuacaucgacaagcagcugcugccgauccucaacaagcagagcugcuccaucagcaacaucgagaccgugaucgaguuccagcagaagaacaaccggcugcuggagaucacccgcgaguucuccgugaacgccggcgucaccacgcccgugagcaccuacaugcucaccaacagcgagcugcugucccucaucaacgacaugcccaucaccaacgaccagaagaagcugaugagcaacaacgugcagaucguccggcagcaguccuacagcaucaugugcaucaucaaggaggaggugcuggccuacgugguccagcucccccuguacggggugaucgacacgccgugcuggaagcugcacaccagcccccucugcaccaccaacacgaaggagggcuccaacaucugccugacccgcaccgaccgggggugguacugcgacaacgcgggcuccgugagcuucuucccccaggccgagaccugcaagguccaguccaaccgcguguucugcgacacgaugaacagccggacccuccccuccgaggucaaccugugcaacguggacaucuucaacccgaaguacgacugcaagaucaugaccagcaagaccgacguguccagcuccgucaucacgagccugggcgccaucguguccugcuacgggaagaccaagugcaccgccagcaacaagaaccggggcaucaucaagaccuucuccaacgggugcgacuacgugagcaacaagggcgucgacacggugagcgugggcaacacccucuacuacgucaacaagcaggaggggaagucccuguacgugaagggcgagcccaucaucaacuucuacgacccccugguguuccccagcgacgaguucgacgccuccaucagccaggucaacgagaagaucaaccagucccucgcguucauccgcaagagcgacgagcugcugcacaacgugaacgccgggaaguccaccaccaacaucaugaucaccacgaucaucaucgugaucaucgucauccuccugagccugaucgccgugggccuccugcuguacugcaaggcccgguccaccccggugacccugagcaaggaccagcucuccgggaucaacaacaucgccuucagcaacugaggacuagucccuguucccagagcccacuuuuuuuucuuuuuuugaaauaaaauagccugucuuucagaucuaaaaaaaaaaaaaaaaaaaaaaaaaaaaaaaaaaaaaaaaaaaaaaaaaaaaaaaaaaaaaaaaaaaaaaaaaaaaaaaaaaaaaaaaaaaaaaaaaaaa

SEQ ID NO: 21575 - RNA, 1856 nt, Artificial Sequence
  mRNA product Design a-1 (A100) comprising derived and/or modified sequence from HRSV(A2)__F_DSCav1_mut0 (opt1)
aggagagucccgcagucggcguccagcggcucugcuuguucgugugugugucguugcaggccuuauucaagcuuaccauggagcugcucauccugaaggccaacgccaucaccaccauccugacggcggugaccuucugcuucgccagcggccagaacaucaccgaggaguucuaccaguccacgugcagcgccgucuccaagggguaccucagcgcccugcgcaccggcugguacaccuccgugaucaccaucgagcugagcaacaucaaggagaacaagugcaacgggaccgacgccaaggugaagcucaucaagcaggagcuggacaaguacaagaacgcggucacggagcugcagcuccugaugcaguccacccccgccaccggcagcggguccgccaucgccagcggcguggcggugugcaagguccugcaccucgagggcgaggugaacaagaucaaguccgcccugcugagcaccaacaaggccguggucucccucagcaacgggguguccgugcugacguucaagguccuggaccucaagaacuacaucgacaagcagcugcugccgauccucaacaagcagagcugcuccaucagcaacaucgagaccgugaucgaguuccagcagaagaacaaccggcugcuggagaucacccgcgaguucuccgugaacgccggcgucaccacgcccgugagcaccuacaugcucaccaacagcgagcugcugucccucaucaacgacaugcccaucaccaacgaccagaagaagcugaugagcaacaacgugcagaucguccggcagcaguccuacagcaucaugugcaucaucaaggaggaggugcuggccuacgugguccagcucccccuguacggggugaucgacacgccgugcuggaagcugcacaccagcccccucugcaccaccaacacgaaggagggcagcaacaucugccugacccgcaccgaccgggggugguacugcgacaacgcgggcuccgugagcuucuucccccaggccgagaccugcaagguccaguccaaccgcguguucugcgacacgaugaacagccggacccugcccuccgaggucaaccucugcaacguggacaucuucaacccgaaguacgacugcaagaucaugaccagcaagaccgacguguccagcuccgucaucacgagccugggcgccaucguguccugcuacgggaagaccaagugcaccgccagcaacaagaaccgcggcaucaucaagaccuucuccaacgggugcgacuacgugagcaacaagggcgucgacacggugagcgugggcaacacccuguacuacgucaacaagcaggaggggaagucccucuacgugaagggcgagcccaucaucaacuucuacgacccccugguguuccccagcgacgaguucgacgccuccaucagccaggucaacgagaagaucaaccagucccuggcguucauccggaaguccgacgagcuccugcacaacgugaacgccgggaaguccaccaccaacaucaugaucaccacgaucaucaucgugaucaucgucauccugcucagccugaucgccgugggccugcugcucuacugcaaggcccgcuccaccccggugacccugagcaaggaccagcuguccgggaucaacaacaucgccuucagcaacugaggacuagucccuguucccagagcccacuuuuuuuucuuuuuuugaaauaaaauagccugucuuucagaucuaaaaaaaaaaaaaaaaaaaaaaaaaaaaaaaaaaaaaaaaaaaaaaaaaaaaaaaaaaaaaaaaaaaaaaaaaaaaaaaaaaaaaaaaaaaaaaaaaaaa

SEQ ID NO: 21576 - RNA, 1793 nt, Artificial Sequence
  mRNA product Design a-1 (A100) comprising derived and/or modified sequence from HRSV(A2)__F-del_DSCav1_mut0 (opt1)
aggagagucccgcagucggcguccagcggcucugcuuguucgugugugugucguugcaggccuuauucaagcuuaccauggagcugcucauccugaaggccaacgccaucaccaccauccugacggcggugaccuucugcuucgccagcggccagaacaucaccgaggaguucuaccaguccacgugcagcgccgucuccaagggguaccucagcgcccugcggaccggcugguacaccuccgugaucaccaucgagcugagcaacaucaaggagaacaagugcaacgggaccgacgccaaggugaagcucaucaagcaggagcuggacaaguacaagaacgcggucacggagcugcagcuccugaugcaguccaccccggcaaccggcuccggcuccgccaucgcgagcggcgucgccgugugcaaggugcugcaccucgagggggaggucaacaagaucaagagcgcccugcuguccaccaacaaggccguggugagccucuccaacggcgucagcgugcugaccuucaaggugcuggaccucaagaacuacaucgacaagcagcugcugcccauccugaacaagcagagcugcuccaucagcaacaucgagacggugaucgaguuccagcagaagaacaaccggcuccuggagaucacccgcgaguucagcgugaacgccggggucaccacccccguguccacguacaugcugaccaacagcgagcuccugucccugaucaacgacaugccgaucaccaacgaccagaagaagcucaugagcaacaacgugcagaucguccggcagcaguccuacagcaucaugugcaucaucaaggaggaggugcuggcguacgugguccagcugccccucuacggcgugaucgacacccccugcuggaagcugcacacgagcccccugugcaccaccaacaccaaggagggguccaacaucugccucacgcgcaccgaccggggcugguacugcgacaacgccggcagcgucuccuucuucccgcaggccgagaccugcaaggugcagagcaaccgcguguucugcgacaccaugaacucccggacgcugcccagcgagguaaaccucugcaacgucgacaucuucaaccccaaguacgacugcaagaucaugaccuccaagaccgacgugagcuccagcgugaucaccucccugggggccaucgucagcugcuacggcaagacgaagugcaccgccagcaacaagaaccgggggaucaucaagaccuucuccaacggcugcgacuacgugagcaacaagggcguggacaccguguccgucgggaacacccuguacuacgugaacaagcaggagggcaagagccucuacgugaagggggagcccaucaucaacuucuacgacccgcuggucuuccccuccgacgaguucgacgcgagcaucucccaggugaacgagaagaucaaccagagccuggccuucauccgcaaguccgacgagcugcuccacaacgugaacgccggcaagagcacgaccaacaucaugaucaccaccaucaucaucgucaucaucgugauccugcugucccucaucgccguggggcugcugcucuacugcaaggcccggugaggacuagucccuguucccagagcccacuuuuuuuucuuuuuuugaaauaaaauagccugucuuucagaucuaaaaaaaaaaaaaaaaaaaaaaaaaaaaaaaaaaaaaaaaaaaaaaaaaaaaaaaaaaaaaaaaaaaaaaaaaaaaaaaaaaaaaaaaaaaaaaaaaaaa

SEQ ID NO: 21577 - RNA, 1793 nt, Artificial Sequence
  mRNA product Design a-1 (A100) comprising derived and/or modified sequence from HRSV(A2)__F-del_DSCav1_mut0 (opt1)
aggagagucccgcagucggcguccagcggcucugcuuguucgugugugugucguugcaggccuuauucaagcuuaccauggagcugcucauccugaaggccaacgccaucaccaccauccugacggcggugaccuucugcuucgccagcggccagaacaucaccgaggaguucuaccaguccacgugcagcgccgucuccaagggguaccucagcgcccugcgcaccggcugguacaccuccgugaucaccaucgagcugagcaacaucaaggagaacaagugcaacgggaccgacgccaaggugaagcucaucaagcaggagcuggacaaguacaagaacgcggucacggagcugcagcuccugaugcaguccacccccgccaccggcagcggguccgccaucgccagcggcguggcggugugcaagguccugcaccucgagggcgaggugaacaagaucaaguccgcccugcugagcaccaacaaggccguggucucccucagcaacgggguguccgugcugacguucaagguccuggaccucaagaacuacaucgacaagcagcugcugccgauccucaacaagcagagcugcuccaucagcaacaucgagaccgugaucgaguuccagcagaagaacaaccggcugcuggagaucacccgcgaguucuccgugaacgccggcgucaccacgcccgugagcaccuacaugcucaccaacagcgagcugcugucccucaucaacgacaugcccaucaccaacgaccagaagaagcugaugagcaacaacgugcagaucguccggcagcaguccuacagcaucaugugcaucaucaaggaggaggugcuggccuacgugguccagcucccccuguacggggugaucgacacgccgugcuggaagcugcacaccagcccccucugcaccaccaacacgaaggagggcuccaacaucugccugacccgcaccgaccgggggugguacugcgacaacgcgggcuccgugagcuucuucccccaggccgagaccugcaagguccaguccaaccgcguguucugcgacacgaugaacagccggacccuccccuccgaggucaaccugugcaacguggacaucuucaacccgaaguacgacugcaagaucaugaccagcaagaccgacguguccagcuccgucaucacgagccugggcgccaucguguccugcuacgggaagaccaagugcaccgccagcaacaagaaccggggcaucaucaagaccuucuccaacgggugcgacuacgugagcaacaagggcgucgacacggugagcgugggcaacacccucuacuacgucaacaagcaggaggggaagucccuguacgugaagggcgagcccaucaucaacuucuacgacccccugguguuccccagcgacgaguucgacgccuccaucagccaggucaacgagaagaucaaccagucccucgcguucauccgcaagagcgacgagcugcugcacaacgugaacgccgggaaguccaccaccaacaucaugaucaccacgaucaucaucgugaucaucgucauccuccugagccugaucgccgugggccuccugcuguacugcaaggcccggugaggacuagucccuguucccagagcccacuuuuuuuucuuuuuuugaaauaaaauagccugucuuucagaucuaaaaaaaaaaaaaaaaaaaaaaaaaaaaaaaaaaaaaaaaaaaaaaaaaaaaaaaaaaaaaaaaaaaaaaaaaaaaaaaaaaaaaaaaaaaaaaaaaaaa

SEQ ID NO: 21578 - RNA, 1793 nt, Artificial Sequence
  mRNA product Design a-1 (A100) comprising derived and/or modified sequence from HRSV(A2)__F-del_DSCav1_mut0 (opt1)
aggagagucccgcagucggcguccagcggcucugcuuguucgugugugugucguugcaggccuuauucaagcuuaccauggagcugcucauccugaaggccaacgccaucaccaccauccugacggcggugaccuucugcuucgccagcggccagaacaucaccgaggaguucuaccaguccacgugcagcgccgucuccaagggguaccucagcgcccugcgcaccggcugguacaccuccgugaucaccaucgagcugagcaacaucaaggagaacaagugcaacgggaccgacgccaaggugaagcucaucaagcaggagcuggacaaguacaagaacgcggucacggagcugcagcuccugaugcaguccacccccgccaccggcagcggguccgccaucgccagcggcguggcggugugcaagguccugcaccucgagggcgaggugaacaagaucaaguccgcccugcugagcaccaacaaggccguggucucccucagcaacgggguguccgugcugacguucaagguccuggaccucaagaacuacaucgacaagcagcugcugccgauccucaacaagcagagcugcuccaucagcaacaucgagaccgugaucgaguuccagcagaagaacaaccggcugcuggagaucacccgcgaguucuccgugaacgccggcgucaccacgcccgugagcaccuacaugcucaccaacagcgagcugcugucccucaucaacgacaugcccaucaccaacgaccagaagaagcugaugagcaacaacgugcagaucguccggcagcaguccuacagcaucaugugcaucaucaaggaggaggugcuggccuacgugguccagcucccccuguacggggugaucgacacgccgugcuggaagcugcacaccagcccccucugcaccaccaacacgaaggagggcagcaacaucugccugacccgcaccgaccgggggugguacugcgacaacgcgggcuccgugagcuucuucccccaggccgagaccugcaagguccaguccaaccgcguguucugcgacacgaugaacagccggacccugcccuccgaggucaaccucugcaacguggacaucuucaacccgaaguacgacugcaagaucaugaccagcaagaccgacguguccagcuccgucaucacgagccugggcgccaucguguccugcuacgggaagaccaagugcaccgccagcaacaagaaccgcggcaucaucaagaccuucuccaacgggugcgacuacgugagcaacaagggcgucgacacggugagcgugggcaacacccuguacuacgucaacaagcaggaggggaagucccucuacgugaagggcgagcccaucaucaacuucuacgacccccugguguuccccagcgacgaguucgacgccuccaucagccaggucaacgagaagaucaaccagucccuggcguucauccggaaguccgacgagcuccugcacaacgugaacgccgggaaguccaccaccaacaucaugaucaccacgaucaucaucgugaucaucgucauccugcucagccugaucgccgugggccugcugcucuacugcaaggcccgcugaggacuagucccuguucccagagcccacuuuuuuuucuuuuuuugaaauaaaauagccugucuuucagaucuaaaaaaaaaaaaaaaaaaaaaaaaaaaaaaaaaaaaaaaaaaaaaaaaaaaaaaaaaaaaaaaaaaaaaaaaaaaaaaaaaaaaaaaaaaaaaaaaaaaa

SEQ ID NO: 21579 - RNA, 1856 nt, Artificial Sequence
  mRNA product Design a-1 (A100) comprising derived and/or modified sequence from HRSV(A2)__F_DSCav1_mut1 (opt1)
aggagagucccgcagucggcguccagcggcucugcuuguucgugugugugucguugcaggccuuauucaagcuuaccauggagcugcucauccugaaggccaacgccaucaccaccauccugacggcggugaccuucugcuucgccagcggccagaacaucaccgaggaguucuaccaguccacgugcagcgccgucuccaagggguaccucggcgcccugcggaccggcugguacaccuccgugaucaccaucgagcugagcaacaucaaggagaacaagugcaacgggaccgacgccaaggugaagcucaucaagcaggagcuggacaaguacaagaacgcggucacggagcugcagcuccugaugcaguccaccccggcaaccggcuccggcuccgccaucugcagcggcgucgccgugugcaaggugcugcaccucgagggggaggucaacaagaucaagagcgcccugcuguccaccaacaaggccguggugagccucuccaacggcgucagcgugcugaccuucaaggugcuggaccucaagaacuacaucgacaagcagcugcugcccauccugaacaagcagagcugcuccauccccaacaucgagacggugaucgaguuccagcagaagaacaaccggcuccuggagaucacccgcgaguucagcgugaacgccggggucaccacccccguguccacguacaugcugaccaacagcgagcuccugucccugaucaacgacaugccgaucaccaacgaccagaagaagcucaugagcaacaacgugcagaucguccggcagcaguccuacagcaucaugugcaucaucaaggaggaggugcuggcguacgugguccagcugccccucuacggcgugaucgacacccccugcuggaagcugcacacgagcccccugugcaccaccaacaccaaggagggguccaacaucugccucacgcgcaccgaccggggcugguacugcgacaacgccggcagcgucuccuucuucccgcaggccgagaccugcaaggugcagagcaaccgcguguucugcgacaccaugaacucccugacgcugcccagcgagguaaaccucugcaacgucgacaucuucaaccccaaguacgacugcaagaucaugaccuccaagaccgacgugagcuccagcgugaucaccucccugggggccaucgucagcugcuacggcaagacgaagugcaccgccagcaacaagaaccgggggaucaucaagaccuucuccaacggcugcgacuacgugagcaacaagggcguggacaccguguccgucgggaacacccuguacugcgugaacaagcaggagggccagagccucuacgugaagggggagcccaucaucaacuucuacgacccgcuggucuuccccuccgacgaguucgacgcgagcaucucccaggugaacgagaagaucaaccagagccuggccuucauccgcaaguccgacgagcugcuccacaacgugaacgccggcaagagcacgaccaacaucaugaucaccaccaucaucaucgucaucaucgugauccugcugucccucaucgccguggggcugcugcucuacugcaaggcccggagcacgcccgucacccuguccaaggaccagcugagcggcaucaacaacaucgcguucuccaacugaggacuagucccuguucccagagcccacuuuuuuuucuuuuuuugaaauaaaauagccugucuuucagaucuaaaaaaaaaaaaaaaaaaaaaaaaaaaaaaaaaaaaaaaaaaaaaaaaaaaaaaaaaaaaaaaaaaaaaaaaaaaaaaaaaaaaaaaaaaaaaaaaaaaa

SEQ ID NO: 21580 - RNA, 1856 nt, Artificial Sequence
  mRNA product Design a-1 (A100) comprising derived and/or modified sequence from HRSV(A2)__F_DSCav1_mut1 (opt1)
aggagagucccgcagucggcguccagcggcucugcuuguucgugugugugucguugcaggccuuauucaagcuuaccauggagcugcucauccugaaggccaacgccaucaccaccauccugacggcggugaccuucugcuucgccagcggccagaacaucaccgaggaguucuaccaguccacgugcagcgccgucuccaagggguaccucggcgcccugcgcaccgggugguacaccagcgugaucaccaucgagcuguccaacaucaaggagaacaagugcaacggcaccgacgccaaggugaagcucaucaagcaggagcuggacaaguacaagaacgcggucacggagcugcagcuccugaugcagagcacccccgccaccggguccggcagcgccaucugcuccggcguggccgugugcaagguccugcaccucgagggggaggugaacaagaucaagagcgcgcugcuguccaccaacaaggccguggucagccucuccaacggcgugagcgugcugacguucaagguccuggaccucaagaacuacaucgacaagcagcugcugccgauccucaacaagcaguccugcagcauccccaacaucgagaccgugaucgaguuccagcagaagaacaaccggcugcuggagaucacccgcgaguucuccgugaacgccggggucaccacgcccgugagcaccuacaugcucaccaacuccgagcugcugagccucaucaacgacaugcccaucaccaacgaccagaagaagcugaugagcaacaacgugcagaucguccggcagcaguccuacagcaucaugugcaucaucaaggaggaggugcuggccuacgugguccagcucccgcuguacggcgugaucgacacgcccugcuggaagcugcacaccagcccccucugcaccaccaacacgaaggagggguccaacaucugccugacccgcaccgaccggggcugguacugcgacaacgccggcuccgugagcuucuucccccaggcggagaccugcaagguccaguccaaccgcguguucugcgacacgaugaacagccugacccucccguccgaggucaaccugugcaacguggacaucuucaaccccaaguacgacugcaagaucaugaccagcaagaccgacguguccagcuccgucaucacgagccugggggccaucguguccugcuacggcaagaccaagugcaccgccagcaacaagaaccgggggaucaucaagaccuucuccaacggcugcgacuacgugagcaacaagggcgucgacacgguguccguggggaacacccucuacugcgucaacaagcaggagggccagagccuguacgugaagggggagcccaucaucaacuucuacgacccccugguguucccgagcgacgaguucgacgccuccaucagccaggucaacgagaagaucaaccagucccucgccuucauccgcaagagcgacgagcugcugcacaacgugaacgcgggcaaguccaccaccaacaucaugaucaccacgaucaucaucgugaucaucgucauccuccugagccugaucgccguggggcuccugcuguacugcaaggcccgguccacccccgugacccugagcaaggaccagcucuccggcaucaacaacaucgccuucagcaacugaggacuagucccuguucccagagcccacuuuuuuuucuuuuuuugaaauaaaauagccugucuuucagaucuaaaaaaaaaaaaaaaaaaaaaaaaaaaaaaaaaaaaaaaaaaaaaaaaaaaaaaaaaaaaaaaaaaaaaaaaaaaaaaaaaaaaaaaaaaaaaaaaaaaa

SEQ ID NO: 21581 - RNA, 1856 nt, Artificial Sequence
  mRNA product Design a-1 (A100) comprising derived and/or modified sequence from HRSV(A2)__F_DSCav1_mut1 (opt1)
aggagagucccgcagucggcguccagcggcucugcuuguucgugugugugucguugcaggccuuauucaagcuuaccauggagcugcucauccugaaggccaacgccaucaccaccauccugacggcggugaccuucugcuucgccagcggccagaacaucaccgaggaguucuaccaguccacgugcagcgccgucuccaagggguaccucggcgcccugcgcaccgggugguacaccagcgugaucaccaucgagcuguccaacaucaaggagaacaagugcaacggcaccgacgccaaggugaagcucaucaagcaggagcuggacaaguacaagaacgcggucacggagcugcagcuccugaugcagagcacccccgccaccggguccggcagcgccaucugcuccggcguggccgugugcaagguccugcaccucgagggggaggugaacaagaucaagagcgcgcugcuguccaccaacaaggccguggucagccucuccaacggcgugagcgugcugacguucaagguccuggaccucaagaacuacaucgacaagcagcugcugccgauccucaacaagcaguccugcagcauccccaacaucgagaccgugaucgaguuccagcagaagaacaaccggcugcuggagaucacccgcgaguucuccgugaacgccggggucaccacgcccgugagcaccuacaugcucaccaacuccgagcugcugagccucaucaacgacaugcccaucaccaacgaccagaagaagcugaugagcaacaacgugcagaucguccggcagcaguccuacagcaucaugugcaucaucaaggaggaggugcuggccuacgugguccagcucccgcuguacggcgugaucgacacgcccugcuggaagcugcacaccagcccccucugcaccaccaacacgaaggagggguccaacaucugccugacccgcaccgaccggggcugguacugcgacaacgccggcuccgugagcuucuucccccaggcggagaccugcaagguccaguccaaccgcguguucugcgacacgaugaacagccugacccucccguccgaggucaaccugugcaacguggacaucuucaaccccaaguacgacugcaagaucaugaccagcaagaccgacguguccagcuccgucaucacgagccugggggccaucguguccugcuacggcaagaccaagugcaccgccagcaacaagaaccgggggaucaucaagaccuucuccaacggcugcgacuacgugagcaacaagggcgucgacacgguguccguggggaacacccucuacugcgucaacaagcaggagggccagagccuguacgugaagggggagcccaucaucaacuucuacgacccccugguguucccgagcgacgaguucgacgccuccaucagccaggucaacgagaagaucaaccagucccucgccuucauccgcaagagcgacgagcugcugcacaacgugaacgcgggcaaguccaccaccaacaucaugaucaccacgaucaucaucgugaucaucgucauccuccugagccugaucgccguggggcugcuccuguacugcaaggcccgguccacccccgugacccugagcaaggaccagcucuccggcaucaacaacaucgccuucagcaacugaggacuagucccuguucccagagcccacuuuuuuuucuuuuuuugaaauaaaauagccugucuuucagaucuaaaaaaaaaaaaaaaaaaaaaaaaaaaaaaaaaaaaaaaaaaaaaaaaaaaaaaaaaaaaaaaaaaaaaaaaaaaaaaaaaaaaaaaaaaaaaaaaaaaa

SEQ ID NO: 21582 - RNA, 1793 nt, Artificial Sequence
  mRNA product Design a-1 (A100) comprising derived and/or modified sequence from HRSV(A2)__F-del_DSCav1_mut1 (opt1)
aggagagucccgcagucggcguccagcggcucugcuuguucgugugugugucguugcaggccuuauucaagcuuaccauggagcugcucauccugaaggccaacgccaucaccaccauccugacggcggugaccuucugcuucgccagcggccagaacaucaccgaggaguucuaccaguccacgugcagcgccgucuccaagggguaccucggcgcccugcggaccggcugguacaccuccgugaucaccaucgagcugagcaacaucaaggagaacaagugcaacgggaccgacgccaaggugaagcucaucaagcaggagcuggacaaguacaagaacgcggucacggagcugcagcuccugaugcaguccaccccggcaaccggcuccggcuccgccaucugcagcggcgucgccgugugcaaggugcugcaccucgagggggaggucaacaagaucaagagcgcccugcuguccaccaacaaggccguggugagccucuccaacggcgucagcgugcugaccuucaaggugcuggaccucaagaacuacaucgacaagcagcugcugcccauccugaacaagcagagcugcuccauccccaacaucgagacggugaucgaguuccagcagaagaacaaccggcuccuggagaucacccgcgaguucagcgugaacgccggggucaccacccccguguccacguacaugcugaccaacagcgagcuccugucccugaucaacgacaugccgaucaccaacgaccagaagaagcucaugagcaacaacgugcagaucguccggcagcaguccuacagcaucaugugcaucaucaaggaggaggugcuggcguacgugguccagcugccccucuacggcgugaucgacacccccugcuggaagcugcacacgagcccccugugcaccaccaacaccaaggagggguccaacaucugccucacgcgcaccgaccggggcugguacugcgacaacgccggcagcgucuccuucuucccgcaggccgagaccugcaaggugcagagcaaccgcguguucugcgacaccaugaacucccugacgcugcccagcgagguaaaccucugcaacgucgacaucuucaaccccaaguacgacugcaagaucaugaccuccaagaccgacgugagcuccagcgugaucaccucccugggggccaucgucagcugcuacggcaagacgaagugcaccgccagcaacaagaaccgggggaucaucaagaccuucuccaacggcugcgacuacgugagcaacaagggcguggacaccguguccgucgggaacacccuguacugcgugaacaagcaggagggccagagccucuacgugaagggggagcccaucaucaacuucuacgacccgcuggucuuccccuccgacgaguucgacgcgagcaucucccaggugaacgagaagaucaaccagagccuggccuucauccgcaaguccgacgagcugcuccacaacgugaacgccggcaagagcacgaccaacaucaugaucaccaccaucaucaucgucaucaucgugauccugcugucccucaucgccguggggcugcugcucuacugcaaggcccggugaggacuagucccuguucccagagcccacuuuuuuuucuuuuuuugaaauaaaauagccugucuuucagaucuaaaaaaaaaaaaaaaaaaaaaaaaaaaaaaaaaaaaaaaaaaaaaaaaaaaaaaaaaaaaaaaaaaaaaaaaaaaaaaaaaaaaaaaaaaaaaaaaaaaa

SEQ ID NO: 21583 - RNA, 1793 nt, Artificial Sequence
  mRNA product Design a-1 (A100) comprising derived and/or modified sequence from HRSV(A2)__F-del_DSCav1_mut1 (opt1)
aggagagucccgcagucggcguccagcggcucugcuuguucgugugugugucguugcaggccuuauucaagcuuaccauggagcugcucauccugaaggccaacgccaucaccaccauccugacggcggugaccuucugcuucgccagcggccagaacaucaccgaggaguucuaccaguccacgugcagcgccgucuccaagggguaccucggcgcccugcgcaccgggugguacaccagcgugaucaccaucgagcuguccaacaucaaggagaacaagugcaacggcaccgacgccaaggugaagcucaucaagcaggagcuggacaaguacaagaacgcggucacggagcugcagcuccugaugcagagcacccccgccaccggguccggcagcgccaucugcuccggcguggccgugugcaagguccugcaccucgagggggaggugaacaagaucaagagcgcgcugcuguccaccaacaaggccguggucagccucuccaacggcgugagcgugcugacguucaagguccuggaccucaagaacuacaucgacaagcagcugcugccgauccucaacaagcaguccugcagcauccccaacaucgagaccgugaucgaguuccagcagaagaacaaccggcugcuggagaucacccgcgaguucuccgugaacgccggggucaccacgcccgugagcaccuacaugcucaccaacuccgagcugcugagccucaucaacgacaugcccaucaccaacgaccagaagaagcugaugagcaacaacgugcagaucguccggcagcaguccuacagcaucaugugcaucaucaaggaggaggugcuggccuacgugguccagcucccgcuguacggcgugaucgacacgcccugcuggaagcugcacaccagcccccucugcaccaccaacacgaaggagggguccaacaucugccugacccgcaccgaccggggcugguacugcgacaacgccggcuccgugagcuucuucccccaggcggagaccugcaagguccaguccaaccgcguguucugcgacacgaugaacagccugacccucccguccgaggucaaccugugcaacguggacaucuucaaccccaaguacgacugcaagaucaugaccagcaagaccgacguguccagcuccgucaucacgagccugggggccaucguguccugcuacggcaagaccaagugcaccgccagcaacaagaaccgggggaucaucaagaccuucuccaacggcugcgacuacgugagcaacaagggcgucgacacgguguccguggggaacacccucuacugcgucaacaagcaggagggccagagccuguacgugaagggggagcccaucaucaacuucuacgacccccugguguucccgagcgacgaguucgacgccuccaucagccaggucaacgagaagaucaaccagucccucgccuucauccgcaagagcgacgagcugcugcacaacgugaacgcgggcaaguccaccaccaacaucaugaucaccacgaucaucaucgugaucaucgucauccuccugagccugaucgccguggggcuccugcuguacugcaaggcccggugaggacuagucccuguucccagagcccacuuuuuuuucuuuuuuugaaauaaaauagccugucuuucagaucuaaaaaaaaaaaaaaaaaaaaaaaaaaaaaaaaaaaaaaaaaaaaaaaaaaaaaaaaaaaaaaaaaaaaaaaaaaaaaaaaaaaaaaaaaaaaaaaaaaaa

SEQ ID NO: 21584 - RNA, 1793 nt, Artificial Sequence
  mRNA product Design a-1 (A100) comprising derived and/or modified sequence from HRSV(A2)__F-del_DSCav1_mut1 (opt1)
aggagagucccgcagucggcguccagcggcucugcuuguucgugugugugucguugcaggccuuauucaagcuuaccauggagcugcucauccugaaggccaacgccaucaccaccauccugacggcggugaccuucugcuucgccagcggccagaacaucaccgaggaguucuaccaguccacgugcagcgccgucuccaagggguaccucggcgcccugcgcaccgggugguacaccagcgugaucaccaucgagcuguccaacaucaaggagaacaagugcaacggcaccgacgccaaggugaagcucaucaagcaggagcuggacaaguacaagaacgcggucacggagcugcagcuccugaugcagagcacccccgccaccggguccggcagcgccaucugcuccggcguggccgugugcaagguccugcaccucgagggggaggugaacaagaucaagagcgcgcugcuguccaccaacaaggccguggucagccucuccaacggcgugagcgugcugacguucaagguccuggaccucaagaacuacaucgacaagcagcugcugccgauccucaacaagcaguccugcagcauccccaacaucgagaccgugaucgaguuccagcagaagaacaaccggcugcuggagaucacccgcgaguucuccgugaacgccggggucaccacgcccgugagcaccuacaugcucaccaacuccgagcugcugagccucaucaacgacaugcccaucaccaacgaccagaagaagcugaugagcaacaacgugcagaucguccggcagcaguccuacagcaucaugugcaucaucaaggaggaggugcuggccuacgugguccagcucccgcuguacggcgugaucgacacgcccugcuggaagcugcacaccagcccccucugcaccaccaacacgaaggagggguccaacaucugccugacccgcaccgaccggggcugguacugcgacaacgccggcuccgugagcuucuucccccaggcggagaccugcaagguccaguccaaccgcguguucugcgacacgaugaacagccugacccucccguccgaggucaaccugugcaacguggacaucuucaaccccaaguacgacugcaagaucaugaccagcaagaccgacguguccagcuccgucaucacgagccugggggccaucguguccugcuacggcaagaccaagugcaccgccagcaacaagaaccgggggaucaucaagaccuucuccaacggcugcgacuacgugagcaacaagggcgucgacacgguguccguggggaacacccucuacugcgucaacaagcaggagggccagagccuguacgugaagggggagcccaucaucaacuucuacgacccccugguguucccgagcgacgaguucgacgccuccaucagccaggucaacgagaagaucaaccagucccucgccuucauccgcaagagcgacgagcugcugcacaacgugaacgcgggcaaguccaccaccaacaucaugaucaccacgaucaucaucgugaucaucgucauccuccugagccugaucgccguggggcugcuccuguacugcaaggcccggugaggacuagucccuguucccagagcccacuuuuuuuucuuuuuuugaaauaaaauagccugucuuucagaucuaaaaaaaaaaaaaaaaaaaaaaaaaaaaaaaaaaaaaaaaaaaaaaaaaaaaaaaaaaaaaaaaaaaaaaaaaaaaaaaaaaaaaaaaaaaaaaaaaaaa

SEQ ID NO: 21585 - RNA, 1856 nt, Artificial Sequence
  mRNA product Design a-1 (A100) comprising derived and/or modified sequence from HRSV(A2)__F_DSCav1_mut2 (opt1)
aggagagucccgcagucggcguccagcggcucugcuuguucgugugugugucguugcaggccuuauucaagcuuaccauggagcugcucauccugaaggccaacgccaucaccaccauccugacggcggugaccuucugcuucgccagcggccagaacaucaccgaggaguucuaccaguccacgugcagcgccgucuccaagggguaccucggcgcccugcggaccggcugguacaccuccgugaucaccaucgagcugagcaacaucaaggagaacaagugcaacgggaccgacgccaaggugaagcucaucaagcaggagcuggacaaguacaagaacgcggucacggaccugcagcuccugaugcaguccaccccggcaaccggcuccggcuccgccaucugcagcggcgucgccgugugcaaggugcugcaccucgagggggaggucaacaagaucaagagcgcccugcuguccaccaacaaggccguggugagccucuccaacggcgucagcgugcugaccuucaaggugcuggaccucaagaacuacaucgacaagcagcugcugcccauccugaacaagcagagcugcuccauccccaacaucgagacggugaucgaguuccagcagaagaacaaccggcuccuggagaucacccgcgaguucagcgugaacgccggggucaccacccccguguccacguacaugcugaccaacagcgagcuccugucccugaucaacgacaugccgaucaccaacgaccagaagaagcucaugagcaacaacgugcagaucguccggcagcaguccuacagcaucaugugcaucaucaaggaggaggugcuggcguacgugguccagcugccccucuacggcgugaucgacacccccugcuggaagcugcacacgagcccccugugcaccaccaacaccaaggagggguccaacaucugccucacgcgcaccgaccggggcugguacugcgacaacgccggcagcgucuccuucuucccgcaggccgagaccugcaaggugcagagcaaccgcguguucugcgacaccaugaacucccugacgcugcccagcgagguaaaccucugcaacgucgacaucuucaaccccaaguacgacugcaagaucaugaccuccaagaccgacgugagcuccagcgugaucaccucccugggggccaucgucagcugcuacggcaagacgaagugcaccgccagcaacaagaaccgggggaucaucaagaccuucuccaacggcugcgacuacgugagcaacaagggcguggacaccguguccgucgggaacacccuguacugcgugaacaagcaggagggccagagccucuacgugaagggggagcccaucaucaacuucuacgacccgcuggucuuccccuccgacgaguucgacgcgagcaucucccaggugaacgagaagaucaaccagagccuggccuucauccgcaaguccgacgagcugcuccacaacgugaacgccggcaagagcacgaccaacaucaugaucaccaccaucaucaucgucaucaucgugauccugcugucccucaucgccguggggcugcugcucuacugcaaggcccggagcacgcccgucacccuguccaaggaccagcugagcggcaucaacaacaucgcguucuccaacugaggacuagucccuguucccagagcccacuuuuuuuucuuuuuuugaaauaaaauagccugucuuucagaucuaaaaaaaaaaaaaaaaaaaaaaaaaaaaaaaaaaaaaaaaaaaaaaaaaaaaaaaaaaaaaaaaaaaaaaaaaaaaaaaaaaaaaaaaaaaaaaaaaaaa

SEQ ID NO: 21586 - RNA, 1856 nt, Artificial Sequence
  mRNA product Design a-1 (A100) comprising derived and/or modified sequence from HRSV(A2)__F_DSCav1_mut2 (opt1)
aggagagucccgcagucggcguccagcggcucugcuuguucgugugugugucguugcaggccuuauucaagcuuaccauggagcugcucauccugaaggccaacgccaucaccaccauccugacggcggugaccuucugcuucgccagcggccagaacaucaccgaggaguucuaccaguccacgugcagcgccgucuccaagggguaccucggcgcccugcgcaccgggugguacaccagcgugaucaccaucgagcuguccaacaucaaggagaacaagugcaacggcaccgacgccaaggugaagcucaucaagcaggagcuggacaaguacaagaacgcggucacggaccugcagcuccugaugcagagcacccccgccaccggguccggcagcgccaucugcuccggcguggccgugugcaagguccugcaccucgagggggaggugaacaagaucaagagcgcgcugcuguccaccaacaaggccguggucagccucuccaacggcgugagcgugcugacguucaagguccuggaccucaagaacuacaucgacaagcagcugcugccgauccucaacaagcaguccugcagcauccccaacaucgagaccgugaucgaguuccagcagaagaacaaccggcugcuggagaucacccgcgaguucuccgugaacgccggggucaccacgcccgugagcaccuacaugcucaccaacuccgagcugcugagccucaucaacgacaugcccaucaccaacgaccagaagaagcugaugagcaacaacgugcagaucguccggcagcaguccuacagcaucaugugcaucaucaaggaggaggugcuggccuacgugguccagcucccgcuguacggcgugaucgacacgcccugcuggaagcugcacaccagcccccucugcaccaccaacacgaaggagggguccaacaucugccugacccgcaccgaccggggcugguacugcgacaacgccggcuccgugagcuucuucccccaggcggagaccugcaagguccaguccaaccgcguguucugcgacacgaugaacagccugacccucccguccgaggucaaccugugcaacguggacaucuucaaccccaaguacgacugcaagaucaugaccagcaagaccgacguguccagcuccgucaucacgagccugggggccaucguguccugcuacggcaagaccaagugcaccgccagcaacaagaaccgggggaucaucaagaccuucuccaacggcugcgacuacgugagcaacaagggcgucgacacgguguccguggggaacacccucuacugcgucaacaagcaggagggccagagccuguacgugaagggggagcccaucaucaacuucuacgacccccugguguucccgagcgacgaguucgacgccuccaucagccaggucaacgagaagaucaaccagucccucgccuucauccgcaagagcgacgagcugcugcacaacgugaacgcgggcaaguccaccaccaacaucaugaucaccacgaucaucaucgugaucaucgucauccuccugagccugaucgccguggggcuccugcuguacugcaaggcccgguccacccccgugacccugagcaaggaccagcucuccggcaucaacaacaucgccuucagcaacugaggacuagucccuguucccagagcccacuuuuuuuucuuuuuuugaaauaaaauagccugucuuucagaucuaaaaaaaaaaaaaaaaaaaaaaaaaaaaaaaaaaaaaaaaaaaaaaaaaaaaaaaaaaaaaaaaaaaaaaaaaaaaaaaaaaaaaaaaaaaaaaaaaaaa

SEQ ID NO: 21587 - RNA, 1856 nt, Artificial Sequence
  mRNA product Design a-1 (A100) comprising derived and/or modified sequence from HRSV(A2)__F_DSCav1_mut2 (opt1)
aggagagucccgcagucggcguccagcggcucugcuuguucgugugugugucguugcaggccuuauucaagcuuaccauggagcugcucauccugaaggccaacgccaucaccaccauccugacggcggugaccuucugcuucgccagcggccagaacaucaccgaggaguucuaccaguccacgugcagcgccgucuccaagggguaccucggcgcccugcgcaccgggugguacaccagcgugaucaccaucgagcuguccaacaucaaggagaacaagugcaacggcaccgacgccaaggugaagcucaucaagcaggagcuggacaaguacaagaacgcggucacggaccugcagcuccugaugcagagcacccccgccaccggguccggcagcgccaucugcuccggcguggccgugugcaagguccugcaccucgagggggaggugaacaagaucaagagcgcgcugcuguccaccaacaaggccguggucagccucuccaacggcgugagcgugcugacguucaagguccuggaccucaagaacuacaucgacaagcagcugcugccgauccucaacaagcaguccugcagcauccccaacaucgagaccgugaucgaguuccagcagaagaacaaccggcugcuggagaucacccgcgaguucuccgugaacgccggggucaccacgcccgugagcaccuacaugcucaccaacuccgagcugcugagccucaucaacgacaugcccaucaccaacgaccagaagaagcugaugagcaacaacgugcagaucguccggcagcaguccuacagcaucaugugcaucaucaaggaggaggugcuggccuacgugguccagcucccgcuguacggcgugaucgacacgcccugcuggaagcugcacaccagcccccucugcaccaccaacacgaaggagggguccaacaucugccugacccgcaccgaccggggcugguacugcgacaacgccggcuccgugagcuucuucccccaggcggagaccugcaagguccaguccaaccgcguguucugcgacacgaugaacagccugacccucccguccgaggucaaccugugcaacguggacaucuucaaccccaaguacgacugcaagaucaugaccagcaagaccgacguguccagcuccgucaucacgagccugggggccaucguguccugcuacggcaagaccaagugcaccgccagcaacaagaaccgggggaucaucaagaccuucuccaacggcugcgacuacgugagcaacaagggcgucgacacgguguccguggggaacacccucuacugcgucaacaagcaggagggccagagccuguacgugaagggggagcccaucaucaacuucuacgacccccugguguucccgagcgacgaguucgacgccuccaucagccaggucaacgagaagaucaaccagucccucgccuucauccgcaagagcgacgagcugcugcacaacgugaacgcgggcaaguccaccaccaacaucaugaucaccacgaucaucaucgugaucaucgucauccuccugagccugaucgccguggggcugcuccuguacugcaaggcccgguccacccccgugacccugagcaaggaccagcucuccggcaucaacaacaucgccuucagcaacugaggacuagucccuguucccagagcccacuuuuuuuucuuuuuuugaaauaaaauagccugucuuucagaucuaaaaaaaaaaaaaaaaaaaaaaaaaaaaaaaaaaaaaaaaaaaaaaaaaaaaaaaaaaaaaaaaaaaaaaaaaaaaaaaaaaaaaaaaaaaaaaaaaaaa

SEQ ID NO: 21588 - RNA, 1793 nt, Artificial Sequence
  mRNA product Design a-1 (A100) comprising derived and/or modified sequence from HRSV(A2)__F-del_DSCav1_mut2 (opt1)
aggagagucccgcagucggcguccagcggcucugcuuguucgugugugugucguugcaggccuuauucaagcuuaccauggagcugcucauccugaaggccaacgccaucaccaccauccugacggcggugaccuucugcuucgccagcggccagaacaucaccgaggaguucuaccaguccacgugcagcgccgucuccaagggguaccucggcgcccugcggaccggcugguacaccuccgugaucaccaucgagcugagcaacaucaaggagaacaagugcaacgggaccgacgccaaggugaagcucaucaagcaggagcuggacaaguacaagaacgcggucacggaccugcagcuccugaugcaguccaccccggcaaccggcuccggcuccgccaucugcagcggcgucgccgugugcaaggugcugcaccucgagggggaggucaacaagaucaagagcgcccugcuguccaccaacaaggccguggugagccucuccaacggcgucagcgugcugaccuucaaggugcuggaccucaagaacuacaucgacaagcagcugcugcccauccugaacaagcagagcugcuccauccccaacaucgagacggugaucgaguuccagcagaagaacaaccggcuccuggagaucacccgcgaguucagcgugaacgccggggucaccacccccguguccacguacaugcugaccaacagcgagcuccugucccugaucaacgacaugccgaucaccaacgaccagaagaagcucaugagcaacaacgugcagaucguccggcagcaguccuacagcaucaugugcaucaucaaggaggaggugcuggcguacgugguccagcugccccucuacggcgugaucgacacccccugcuggaagcugcacacgagcccccugugcaccaccaacaccaaggagggguccaacaucugccucacgcgcaccgaccggggcugguacugcgacaacgccggcagcgucuccuucuucccgcaggccgagaccugcaaggugcagagcaaccgcguguucugcgacaccaugaacucccugacgcugcccagcgagguaaaccucugcaacgucgacaucuucaaccccaaguacgacugcaagaucaugaccuccaagaccgacgugagcuccagcgugaucaccucccugggggccaucgucagcugcuacggcaagacgaagugcaccgccagcaacaagaaccgggggaucaucaagaccuucuccaacggcugcgacuacgugagcaacaagggcguggacaccguguccgucgggaacacccuguacugcgugaacaagcaggagggccagagccucuacgugaagggggagcccaucaucaacuucuacgacccgcuggucuuccccuccgacgaguucgacgcgagcaucucccaggugaacgagaagaucaaccagagccuggccuucauccgcaaguccgacgagcugcuccacaacgugaacgccggcaagagcacgaccaacaucaugaucaccaccaucaucaucgucaucaucgugauccugcugucccucaucgccguggggcugcugcucuacugcaaggcccggugaggacuagucccuguucccagagcccacuuuuuuuucuuuuuuugaaauaaaauagccugucuuucagaucuaaaaaaaaaaaaaaaaaaaaaaaaaaaaaaaaaaaaaaaaaaaaaaaaaaaaaaaaaaaaaaaaaaaaaaaaaaaaaaaaaaaaaaaaaaaaaaaaaaaa

SEQ ID NO: 21589 - RNA, 1793 nt, Artificial Sequence
  mRNA product Design a-1 (A100) comprising derived and/or modified sequence from HRSV(A2)__F-del_DSCav1_mut2 (opt1)
aggagagucccgcagucggcguccagcggcucugcuuguucgugugugugucguugcaggccuuauucaagcuuaccauggagcugcucauccugaaggccaacgccaucaccaccauccugacggcggugaccuucugcuucgccagcggccagaacaucaccgaggaguucuaccaguccacgugcagcgccgucuccaagggguaccucggcgcccugcgcaccgggugguacaccagcgugaucaccaucgagcuguccaacaucaaggagaacaagugcaacggcaccgacgccaaggugaagcucaucaagcaggagcuggacaaguacaagaacgcggucacggaccugcagcuccugaugcagagcacccccgccaccggguccggcagcgccaucugcuccggcguggccgugugcaagguccugcaccucgagggggaggugaacaagaucaagagcgcgcugcuguccaccaacaaggccguggucagccucuccaacggcgugagcgugcugacguucaagguccuggaccucaagaacuacaucgacaagcagcugcugccgauccucaacaagcaguccugcagcauccccaacaucgagaccgugaucgaguuccagcagaagaacaaccggcugcuggagaucacccgcgaguucuccgugaacgccggggucaccacgcccgugagcaccuacaugcucaccaacuccgagcugcugagccucaucaacgacaugcccaucaccaacgaccagaagaagcugaugagcaacaacgugcagaucguccggcagcaguccuacagcaucaugugcaucaucaaggaggaggugcuggccuacgugguccagcucccgcuguacggcgugaucgacacgcccugcuggaagcugcacaccagcccccucugcaccaccaacacgaaggagggguccaacaucugccugacccgcaccgaccggggcugguacugcgacaacgccggcuccgugagcuucuucccccaggcggagaccugcaagguccaguccaaccgcguguucugcgacacgaugaacagccugacccucccguccgaggucaaccugugcaacguggacaucuucaaccccaaguacgacugcaagaucaugaccagcaagaccgacguguccagcuccgucaucacgagccugggggccaucguguccugcuacggcaagaccaagugcaccgccagcaacaagaaccgggggaucaucaagaccuucuccaacggcugcgacuacgugagcaacaagggcgucgacacgguguccguggggaacacccucuacugcgucaacaagcaggagggccagagccuguacgugaagggggagcccaucaucaacuucuacgacccccugguguucccgagcgacgaguucgacgccuccaucagccaggucaacgagaagaucaaccagucccucgccuucauccgcaagagcgacgagcugcugcacaacgugaacgcgggcaaguccaccaccaacaucaugaucaccacgaucaucaucgugaucaucgucauccuccugagccugaucgccguggggcuccugcuguacugcaaggcccggugaggacuagucccuguucccagagcccacuuuuuuuucuuuuuuugaaauaaaauagccugucuuucagaucuaaaaaaaaaaaaaaaaaaaaaaaaaaaaaaaaaaaaaaaaaaaaaaaaaaaaaaaaaaaaaaaaaaaaaaaaaaaaaaaaaaaaaaaaaaaaaaaaaaaa

SEQ ID NO: 21590 - RNA, 1793 nt, Artificial Sequence
  mRNA product Design a-1 (A100) comprising derived and/or modified sequence from HRSV(A2)__F-del_DSCav1_mut2 (opt1)
aggagagucccgcagucggcguccagcggcucugcuuguucgugugugugucguugcaggccuuauucaagcuuaccauggagcugcucauccugaaggccaacgccaucaccaccauccugacggcggugaccuucugcuucgccagcggccagaacaucaccgaggaguucuaccaguccacgugcagcgccgucuccaagggguaccucggcgcccugcgcaccgggugguacaccagcgugaucaccaucgagcuguccaacaucaaggagaacaagugcaacggcaccgacgccaaggugaagcucaucaagcaggagcuggacaaguacaagaacgcggucacggaccugcagcuccugaugcagagcacccccgccaccggguccggcagcgccaucugcuccggcguggccgugugcaagguccugcaccucgagggggaggugaacaagaucaagagcgcgcugcuguccaccaacaaggccguggucagccucuccaacggcgugagcgugcugacguucaagguccuggaccucaagaacuacaucgacaagcagcugcugccgauccucaacaagcaguccugcagcauccccaacaucgagaccgugaucgaguuccagcagaagaacaaccggcugcuggagaucacccgcgaguucuccgugaacgccggggucaccacgcccgugagcaccuacaugcucaccaacuccgagcugcugagccucaucaacgacaugcccaucaccaacgaccagaagaagcugaugagcaacaacgugcagaucguccggcagcaguccuacagcaucaugugcaucaucaaggaggaggugcuggccuacgugguccagcucccgcuguacggcgugaucgacacgcccugcuggaagcugcacaccagcccccucugcaccaccaacacgaaggagggguccaacaucugccugacccgcaccgaccggggcugguacugcgacaacgccggcuccgugagcuucuucccccaggcggagaccugcaagguccaguccaaccgcguguucugcgacacgaugaacagccugacccucccguccgaggucaaccugugcaacguggacaucuucaaccccaaguacgacugcaagaucaugaccagcaagaccgacguguccagcuccgucaucacgagccugggggccaucguguccugcuacggcaagaccaagugcaccgccagcaacaagaaccgggggaucaucaagaccuucuccaacggcugcgacuacgugagcaacaagggcgucgacacgguguccguggggaacacccucuacugcgucaacaagcaggagggccagagccuguacgugaagggggagcccaucaucaacuucuacgacccccugguguucccgagcgacgaguucgacgccuccaucagccaggucaacgagaagaucaaccagucccucgccuucauccgcaagagcgacgagcugcugcacaacgugaacgcgggcaaguccaccaccaacaucaugaucaccacgaucaucaucgugaucaucgucauccuccugagccugaucgccguggggcugcuccuguacugcaaggcccggugaggacuagucccuguucccagagcccacuuuuuuuucuuuuuuugaaauaaaauagccugucuuucagaucuaaaaaaaaaaaaaaaaaaaaaaaaaaaaaaaaaaaaaaaaaaaaaaaaaaaaaaaaaaaaaaaaaaaaaaaaaaaaaaaaaaaaaaaaaaaaaaaaaaaa

SEQ ID NO: 21591 - RNA, 1856 nt, Artificial Sequence
  mRNA product Design a-1 (A100) comprising derived and/or modified sequence from HRSV(A2)__F_DSCav1_mut3 (opt1)
aggagagucccgcagucggcguccagcggcucugcuuguucgugugugugucguugcaggccuuauucaagcuuaccauggagcugcucauccugaaggccaacgccaucaccaccauccugacggcggugaccuucugcuucgccagcggccagaacaucaccgaggaguucuaccaguccacgugcagcgccgucuccaagggguaccucggcgcccugcggaccggcugguacaccuccgugaucaccaucgagcugagcaacaucaaggagaucaagugcaacgggaccgacgccaaggugaagcucaucaagcaggagcuggacaaguacaagaacgcggucacggaccugcagcuccugaugcaguccaccccggcaaccggcuccggcuccgccaucugcagcggcgucgccgugugcaaggugcugcaccucgagggggaggucaacaagaucaagagcgcccugcuguccaccaacaaggccguggugagccucuccaacggcgucagcgugcugaccuucaaggugcuggaccucaagaacuacaucgacaagcagcugcugcccauccugaacaagcagagcugcuccauccccaacaucgagacggugaucgaguuccagcagaagaacaaccggcuccuggagaucacccgcgaguucagcgugaacgccggggucaccacccccguguccacguacaugcugaccaacagcgagcuccugucccugaucaacgacaugccgaucaccaacgaccagaagaagcucaugagcaacaacgugcagaucguccggcagcaguccuacagcaucaugugcaucaucaaggaggaggugcuggcguacgugguccagcugccccucuacggcgugaucgacacccccugcuggaagcugcacacgagcccccugugcaccaccaacaccaaggagggguccaacaucugccucacgcgcaccgaccggggcugguacugcgacaacgccggcagcgucuccuucuucccgcaggccgagaccugcaaggugcagagcaaccgcguguucugcgacaccaugaacucccugacgcugcccagcgagguaaaccucugcaacgucgacaucuucaaccccaaguacgacugcaagaucaugaccuccaagaccgacgugagcuccagcgugaucaccucccugggggccaucgucagcugcuacggcaagacgaagugcaccgccagcaacaagaaccgggggaucaucaagaccuucuccaacggcugcgacuacgugagcaacaagggcguggacaccguguccgucgggaacacccuguacugcgugaacaagcaggagggccagagccucuacgugaagggggagcccaucaucaacuucuacgacccgcuggucuuccccuccgacgaguucgacgcgagcaucucccaggugaacgagaagaucaaccagagccuggccuucauccgcaaguccgacgagcugcuccacaacgugaacgccggcaagagcacgaccaacaucaugaucaccaccaucaucaucgucaucaucgugauccugcugucccucaucgccguggggcugcugcucuacugcaaggcccggagcacgcccgucacccuguccaaggaccagcugagcggcaucaacaacaucgcguucuccaacugaggacuagucccuguucccagagcccacuuuuuuuucuuuuuuugaaauaaaauagccugucuuucagaucuaaaaaaaaaaaaaaaaaaaaaaaaaaaaaaaaaaaaaaaaaaaaaaaaaaaaaaaaaaaaaaaaaaaaaaaaaaaaaaaaaaaaaaaaaaaaaaaaaaaa

SEQ ID NO: 21592 - RNA, 1856 nt, Artificial Sequence
  mRNA product Design a-1 (A100) comprising derived and/or modified sequence from HRSV(A2)__F_DSCav1_mut3 (opt1)
aggagagucccgcagucggcguccagcggcucugcuuguucgugugugugucguugcaggccuuauucaagcuuaccauggagcugcucauccugaaggccaacgccaucaccaccauccugacggcggugaccuucugcuucgccagcggccagaacaucaccgaggaguucuaccaguccacgugcagcgccgucuccaagggguaccucggcgcccugcgcaccgggugguacaccagcgugaucaccaucgagcuguccaacaucaaggagaucaagugcaacggcaccgacgccaaggugaagcucaucaagcaggagcuggacaaguacaagaacgcggucacggaccugcagcuccugaugcagagcacccccgccaccggguccggcagcgccaucugcuccggcguggccgugugcaagguccugcaccucgagggggaggugaacaagaucaagagcgcgcugcuguccaccaacaaggccguggucagccucuccaacggcgugagcgugcugacguucaagguccuggaccucaagaacuacaucgacaagcagcugcugccgauccucaacaagcaguccugcagcauccccaacaucgagaccgugaucgaguuccagcagaagaacaaccggcugcuggagaucacccgcgaguucuccgugaacgccggggucaccacgcccgugagcaccuacaugcucaccaacuccgagcugcugagccucaucaacgacaugcccaucaccaacgaccagaagaagcugaugagcaacaacgugcagaucguccggcagcaguccuacagcaucaugugcaucaucaaggaggaggugcuggccuacgugguccagcucccgcuguacggcgugaucgacacgcccugcuggaagcugcacaccagcccccucugcaccaccaacacgaaggagggguccaacaucugccugacccgcaccgaccggggcugguacugcgacaacgccggcuccgugagcuucuucccccaggcggagaccugcaagguccaguccaaccgcguguucugcgacacgaugaacagccugacccucccguccgaggucaaccugugcaacguggacaucuucaaccccaaguacgacugcaagaucaugaccagcaagaccgacguguccagcuccgucaucacgagccugggggccaucguguccugcuacggcaagaccaagugcaccgccagcaacaagaaccgggggaucaucaagaccuucuccaacggcugcgacuacgugagcaacaagggcgucgacacgguguccguggggaacacccucuacugcgucaacaagcaggagggccagagccuguacgugaagggggagcccaucaucaacuucuacgacccccugguguucccgagcgacgaguucgacgccuccaucagccaggucaacgagaagaucaaccagucccucgccuucauccgcaagagcgacgagcugcugcacaacgugaacgcgggcaaguccaccaccaacaucaugaucaccacgaucaucaucgugaucaucgucauccuccugagccugaucgccguggggcuccugcuguacugcaaggcccgguccacccccgugacccugagcaaggaccagcucuccggcaucaacaacaucgccuucagcaacugaggacuagucccuguucccagagcccacuuuuuuuucuuuuuuugaaauaaaauagccugucuuucagaucuaaaaaaaaaaaaaaaaaaaaaaaaaaaaaaaaaaaaaaaaaaaaaaaaaaaaaaaaaaaaaaaaaaaaaaaaaaaaaaaaaaaaaaaaaaaaaaaaaaaa

SEQ ID NO: 21593 - RNA, 1856 nt, Artificial Sequence
  mRNA product Design a-1 (A100) comprising derived and/or modified sequence from HRSV(A2)__F_DSCav1_mut3 (opt1)
aggagagucccgcagucggcguccagcggcucugcuuguucgugugugugucguugcaggccuuauucaagcuuaccauggagcugcucauccugaaggccaacgccaucaccaccauccugacggcggugaccuucugcuucgccagcggccagaacaucaccgaggaguucuaccaguccacgugcagcgccgucuccaagggguaccucggcgcccugcgcaccgggugguacaccagcgugaucaccaucgagcuguccaacaucaaggagaucaagugcaacggcaccgacgccaaggugaagcucaucaagcaggagcuggacaaguacaagaacgcggucacggaccugcagcuccugaugcagagcacccccgccaccggguccggcagcgccaucugcuccggcguggccgugugcaagguccugcaccucgagggggaggugaacaagaucaagagcgcgcugcuguccaccaacaaggccguggucagccucuccaacggcgugagcgugcugacguucaagguccuggaccucaagaacuacaucgacaagcagcugcugccgauccucaacaagcaguccugcagcauccccaacaucgagaccgugaucgaguuccagcagaagaacaaccggcugcuggagaucacccgcgaguucuccgugaacgccggggucaccacgcccgugagcaccuacaugcucaccaacuccgagcugcugagccucaucaacgacaugcccaucaccaacgaccagaagaagcugaugagcaacaacgugcagaucguccggcagcaguccuacagcaucaugugcaucaucaaggaggaggugcuggccuacgugguccagcucccgcuguacggcgugaucgacacgcccugcuggaagcugcacaccagcccccucugcaccaccaacacgaaggagggguccaacaucugccugacccgcaccgaccggggcugguacugcgacaacgccggcuccgugagcuucuucccccaggcggagaccugcaagguccaguccaaccgcguguucugcgacacgaugaacagccugacccucccguccgaggucaaccugugcaacguggacaucuucaaccccaaguacgacugcaagaucaugaccagcaagaccgacguguccagcuccgucaucacgagccugggggccaucguguccugcuacggcaagaccaagugcaccgccagcaacaagaaccgggggaucaucaagaccuucuccaacggcugcgacuacgugagcaacaagggcgucgacacgguguccguggggaacacccucuacugcgucaacaagcaggagggccagagccuguacgugaagggggagcccaucaucaacuucuacgacccccugguguucccgagcgacgaguucgacgccuccaucagccaggucaacgagaagaucaaccagucccucgccuucauccgcaagagcgacgagcugcugcacaacgugaacgcgggcaaguccaccaccaacaucaugaucaccacgaucaucaucgugaucaucgucauccuccugagccugaucgccguggggcugcuccuguacugcaaggcccgguccacccccgugacccugagcaaggaccagcucuccggcaucaacaacaucgccuucagcaacugaggacuagucccuguucccagagcccacuuuuuuuucuuuuuuugaaauaaaauagccugucuuucagaucuaaaaaaaaaaaaaaaaaaaaaaaaaaaaaaaaaaaaaaaaaaaaaaaaaaaaaaaaaaaaaaaaaaaaaaaaaaaaaaaaaaaaaaaaaaaaaaaaaaaa

SEQ ID NO: 21594 - RNA, 1793 nt, Artificial Sequence
  mRNA product Design a-1 (A100) comprising derived and/or modified sequence from HRSV(A2)__F-del_DSCav1_mut3 (opt1)
aggagagucccgcagucggcguccagcggcucugcuuguucgugugugugucguugcaggccuuauucaagcuuaccauggagcugcucauccugaaggccaacgccaucaccaccauccugacggcggugaccuucugcuucgccagcggccagaacaucaccgaggaguucuaccaguccacgugcagcgccgucuccaagggguaccucggcgcccugcggaccggcugguacaccuccgugaucaccaucgagcugagcaacaucaaggagaucaagugcaacgggaccgacgccaaggugaagcucaucaagcaggagcuggacaaguacaagaacgcggucacggaccugcagcuccugaugcaguccaccccggcaaccggcuccggcuccgccaucugcagcggcgucgccgugugcaaggugcugcaccucgagggggaggucaacaagaucaagagcgcccugcuguccaccaacaaggccguggugagccucuccaacggcgucagcgugcugaccuucaaggugcuggaccucaagaacuacaucgacaagcagcugcugcccauccugaacaagcagagcugcuccauccccaacaucgagacggugaucgaguuccagcagaagaacaaccggcuccuggagaucacccgcgaguucagcgugaacgccggggucaccacccccguguccacguacaugcugaccaacagcgagcuccugucccugaucaacgacaugccgaucaccaacgaccagaagaagcucaugagcaacaacgugcagaucguccggcagcaguccuacagcaucaugugcaucaucaaggaggaggugcuggcguacgugguccagcugccccucuacggcgugaucgacacccccugcuggaagcugcacacgagcccccugugcaccaccaacaccaaggagggguccaacaucugccucacgcgcaccgaccggggcugguacugcgacaacgccggcagcgucuccuucuucccgcaggccgagaccugcaaggugcagagcaaccgcguguucugcgacaccaugaacucccugacgcugcccagcgagguaaaccucugcaacgucgacaucuucaaccccaaguacgacugcaagaucaugaccuccaagaccgacgugagcuccagcgugaucaccucccugggggccaucgucagcugcuacggcaagacgaagugcaccgccagcaacaagaaccgggggaucaucaagaccuucuccaacggcugcgacuacgugagcaacaagggcguggacaccguguccgucgggaacacccuguacugcgugaacaagcaggagggccagagccucuacgugaagggggagcccaucaucaacuucuacgacccgcuggucuuccccuccgacgaguucgacgcgagcaucucccaggugaacgagaagaucaaccagagccuggccuucauccgcaaguccgacgagcugcuccacaacgugaacgccggcaagagcacgaccaacaucaugaucaccaccaucaucaucgucaucaucgugauccugcugucccucaucgccguggggcugcugcucuacugcaaggcccggugaggacuagucccuguucccagagcccacuuuuuuuucuuuuuuugaaauaaaauagccugucuuucagaucuaaaaaaaaaaaaaaaaaaaaaaaaaaaaaaaaaaaaaaaaaaaaaaaaaaaaaaaaaaaaaaaaaaaaaaaaaaaaaaaaaaaaaaaaaaaaaaaaaaaa

SEQ ID NO: 21595 - RNA, 1793 nt, Artificial Sequence
  mRNA product Design a-1 (A100) comprising derived and/or modified sequence from HRSV(A2)__F-del_DSCav1_mut3 (opt1)
aggagagucccgcagucggcguccagcggcucugcuuguucgugugugugucguugcaggccuuauucaagcuuaccauggagcugcucauccugaaggccaacgccaucaccaccauccugacggcggugaccuucugcuucgccagcggccagaacaucaccgaggaguucuaccaguccacgugcagcgccgucuccaagggguaccucggcgcccugcgcaccgggugguacaccagcgugaucaccaucgagcuguccaacaucaaggagaucaagugcaacggcaccgacgccaaggugaagcucaucaagcaggagcuggacaaguacaagaacgcggucacggaccugcagcuccugaugcagagcacccccgccaccggguccggcagcgccaucugcuccggcguggccgugugcaagguccugcaccucgagggggaggugaacaagaucaagagcgcgcugcuguccaccaacaaggccguggucagccucuccaacggcgugagcgugcugacguucaagguccuggaccucaagaacuacaucgacaagcagcugcugccgauccucaacaagcaguccugcagcauccccaacaucgagaccgugaucgaguuccagcagaagaacaaccggcugcuggagaucacccgcgaguucuccgugaacgccggggucaccacgcccgugagcaccuacaugcucaccaacuccgagcugcugagccucaucaacgacaugcccaucaccaacgaccagaagaagcugaugagcaacaacgugcagaucguccggcagcaguccuacagcaucaugugcaucaucaaggaggaggugcuggccuacgugguccagcucccgcuguacggcgugaucgacacgcccugcuggaagcugcacaccagcccccucugcaccaccaacacgaaggagggguccaacaucugccugacccgcaccgaccggggcugguacugcgacaacgccggcuccgugagcuucuucccccaggcggagaccugcaagguccaguccaaccgcguguucugcgacacgaugaacagccugacccucccguccgaggucaaccugugcaacguggacaucuucaaccccaaguacgacugcaagaucaugaccagcaagaccgacguguccagcuccgucaucacgagccugggggccaucguguccugcuacggcaagaccaagugcaccgccagcaacaagaaccgggggaucaucaagaccuucuccaacggcugcgacuacgugagcaacaagggcgucgacacgguguccguggggaacacccucuacugcgucaacaagcaggagggccagagccuguacgugaagggggagcccaucaucaacuucuacgacccccugguguucccgagcgacgaguucgacgccuccaucagccaggucaacgagaagaucaaccagucccucgccuucauccgcaagagcgacgagcugcugcacaacgugaacgcgggcaaguccaccaccaacaucaugaucaccacgaucaucaucgugaucaucgucauccuccugagccugaucgccguggggcuccugcuguacugcaaggcccggugaggacuagucccuguucccagagcccacuuuuuuuucuuuuuuugaaauaaaauagccugucuuucagaucuaaaaaaaaaaaaaaaaaaaaaaaaaaaaaaaaaaaaaaaaaaaaaaaaaaaaaaaaaaaaaaaaaaaaaaaaaaaaaaaaaaaaaaaaaaaaaaaaaaaa

SEQ ID NO: 21596 - RNA, 1793 nt, Artificial Sequence
  mRNA product Design a-1 (A100) comprising derived and/or modified sequence from HRSV(A2)__F-del_DSCav1_mut3 (opt1)
aggagagucccgcagucggcguccagcggcucugcuuguucgugugugugucguugcaggccuuauucaagcuuaccauggagcugcucauccugaaggccaacgccaucaccaccauccugacggcggugaccuucugcuucgccagcggccagaacaucaccgaggaguucuaccaguccacgugcagcgccgucuccaagggguaccucggcgcccugcgcaccgggugguacaccagcgugaucaccaucgagcuguccaacaucaaggagaucaagugcaacggcaccgacgccaaggugaagcucaucaagcaggagcuggacaaguacaagaacgcggucacggaccugcagcuccugaugcagagcacccccgccaccggguccggcagcgccaucugcuccggcguggccgugugcaagguccugcaccucgagggggaggugaacaagaucaagagcgcgcugcuguccaccaacaaggccguggucagccucuccaacggcgugagcgugcugacguucaagguccuggaccucaagaacuacaucgacaagcagcugcugccgauccucaacaagcaguccugcagcauccccaacaucgagaccgugaucgaguuccagcagaagaacaaccggcugcuggagaucacccgcgaguucuccgugaacgccggggucaccacgcccgugagcaccuacaugcucaccaacuccgagcugcugagccucaucaacgacaugcccaucaccaacgaccagaagaagcugaugagcaacaacgugcagaucguccggcagcaguccuacagcaucaugugcaucaucaaggaggaggugcuggccuacgugguccagcucccgcuguacggcgugaucgacacgcccugcuggaagcugcacaccagcccccucugcaccaccaacacgaaggagggguccaacaucugccugacccgcaccgaccggggcugguacugcgacaacgccggcuccgugagcuucuucccccaggcggagaccugcaagguccaguccaaccgcguguucugcgacacgaugaacagccugacccucccguccgaggucaaccugugcaacguggacaucuucaaccccaaguacgacugcaagaucaugaccagcaagaccgacguguccagcuccgucaucacgagccugggggccaucguguccugcuacggcaagaccaagugcaccgccagcaacaagaaccgggggaucaucaagaccuucuccaacggcugcgacuacgugagcaacaagggcgucgacacgguguccguggggaacacccucuacugcgucaacaagcaggagggccagagccuguacgugaagggggagcccaucaucaacuucuacgacccccugguguucccgagcgacgaguucgacgccuccaucagccaggucaacgagaagaucaaccagucccucgccuucauccgcaagagcgacgagcugcugcacaacgugaacgcgggcaaguccaccaccaacaucaugaucaccacgaucaucaucgugaucaucgucauccuccugagccugaucgccguggggcugcuccuguacugcaaggcccggugaggacuagucccuguucccagagcccacuuuuuuuucuuuuuuugaaauaaaauagccugucuuucagaucuaaaaaaaaaaaaaaaaaaaaaaaaaaaaaaaaaaaaaaaaaaaaaaaaaaaaaaaaaaaaaaaaaaaaaaaaaaaaaaaaaaaaaaaaaaaaaaaaaaaa

SEQ ID NO: 21597 - RNA, 1856 nt, Artificial Sequence
  mRNA product Design a-1 (A100) comprising derived and/or modified sequence from HRSV(A2)__F_DSCav1_mut4 (opt1)
aggagagucccgcagucggcguccagcggcucugcuuguucgugugugugucguugcaggccuuauucaagcuuaccauggagcugcucauccugaaggccaacgccaucaccaccauccugacggcggugaccuucugcuucgccagcggccagaacaucaccgaggaguucuaccaguccacgugcagcgccgucuccaagggguaccucagcgcccugcggaccggcugguacaccuccgugaucaccaucgagcugagcaacaucaaggagaacaagugcaacgggaccgacgccaaggugaagcucaucaagcaggagcuggacaaguacaagaacgcggucacggagcugcagcuccugaugcaguccaccccggcaaccggcuccggcuccgccaucugcagcggcgucgccgugugcaaggugcugcaccucgagggggaggucaacaagaucaagagcgcccugcuguccaccaacaaggccguggugagccucuccaacggcgucagcgugcugaccuucaaggugcuggaccucaagaacuacaucgacaagcagcugcugcccauccugaacaagcagagcugcuccaucagcaacaucgagacggugaucgaguuccagcagaagaacaaccggcuccuggagaucacccgcgaguucagcgugaacgccggggucaccacccccguguccacguacaugcugaccaacagcgagcuccugucccugaucaacgacaugccgaucaccaacgaccagaagaagcucaugagcaacaacgugcagaucguccggcagcaguccuacagcaucaugugcaucaucaaggaggaggugcuggcguacgugguccagcugccccucuacggcgugaucgacacccccugcuggaagcugcacacgagcccccugugcaccaccaacaccaaggagggguccaacaucugccucacgcgcaccgaccggggcugguacugcgacaacgccggcagcgucuccuucuucccgcaggccgagaccugcaaggugcagagcaaccgcguguucugcgacaccaugaacucccggacgcugcccagcgagguaaaccucugcaacgucgacaucuucaaccccaaguacgacugcaagaucaugaccuccaagaccgacgugagcuccagcgugaucaccucccugggggccaucgucagcugcuacggcaagacgaagugcaccgccagcaacaagaaccgggggaucaucaagaccuucuccaacggcugcgacuacgugagcaacaagggcguggacaccguguccgucgggaacacccuguacugcgugaacaagcaggagggcaagagccucuacgugaagggggagcccaucaucaacuucuacgacccgcuggucuuccccuccgacgaguucgacgcgagcaucucccaggugaacgagaagaucaaccagagccuggccuucauccgcaaguccgacgagcugcuccacaacgugaacgccggcaagagcacgaccaacaucaugaucaccaccaucaucaucgucaucaucgugauccugcugucccucaucgccguggggcugcugcucuacugcaaggcccggagcacgcccgucacccuguccaaggaccagcugagcggcaucaacaacaucgcguucuccaacugaggacuagucccuguucccagagcccacuuuuuuuucuuuuuuugaaauaaaauagccugucuuucagaucuaaaaaaaaaaaaaaaaaaaaaaaaaaaaaaaaaaaaaaaaaaaaaaaaaaaaaaaaaaaaaaaaaaaaaaaaaaaaaaaaaaaaaaaaaaaaaaaaaaaa

SEQ ID NO: 21598 - RNA, 1856 nt, Artificial Sequence
  mRNA product Design a-1 (A100) comprising derived and/or modified sequence from HRSV(A2)__F_DSCav1_mut4 (opt1)
aggagagucccgcagucggcguccagcggcucugcuuguucgugugugugucguugcaggccuuauucaagcuuaccauggagcugcucauccugaaggccaacgccaucaccaccauccugacggcggugaccuucugcuucgccagcggccagaacaucaccgaggaguucuaccaguccacgugcagcgccgucuccaagggguaccucagcgcccugcgcaccggcugguacaccuccgugaucaccaucgagcugagcaacaucaaggagaacaagugcaacgggaccgacgccaaggugaagcucaucaagcaggagcuggacaaguacaagaacgcggucacggagcugcagcuccugaugcaguccacccccgccaccggcagcggguccgccaucugcagcggcguggccgugugcaagguccugcaccucgagggcgaggugaacaagaucaaguccgcgcugcugagcaccaacaaggccguggucucccucagcaacgggguguccgugcugacguucaagguccuggaccucaagaacuacaucgacaagcagcugcugccgauccucaacaagcagagcugcuccaucagcaacaucgagaccgugaucgaguuccagcagaagaacaaccggcugcuggagaucacccgcgaguucuccgugaacgccggcgucaccacgcccgugagcaccuacaugcucaccaacagcgagcugcugucccucaucaacgacaugcccaucaccaacgaccagaagaagcugaugagcaacaacgugcagaucguccggcagcaguccuacagcaucaugugcaucaucaaggaggaggugcuggccuacgugguccagcucccccuguacggggugaucgacacgccgugcuggaagcugcacaccagcccccucugcaccaccaacacgaaggagggcuccaacaucugccugacccgcaccgaccgggggugguacugcgacaacgccggcuccgugagcuucuucccccaggcggagaccugcaagguccaguccaaccgcguguucugcgacacgaugaacagccggacccuccccuccgaggucaaccugugcaacguggacaucuucaacccgaaguacgacugcaagaucaugaccagcaagaccgacguguccagcuccgucaucacgagccugggcgccaucguguccugcuacgggaagaccaagugcaccgccagcaacaagaaccggggcaucaucaagaccuucuccaacgggugcgacuacgugagcaacaagggcgucgacacggugagcgugggcaacacccucuacugcgucaacaagcaggaggggaagucccuguacgugaagggcgagcccaucaucaacuucuacgacccccugguguuccccagcgacgaguucgacgccuccaucagccaggucaacgagaagaucaaccagucccucgccuucauccgcaagagcgacgagcugcugcacaacgugaacgcggggaaguccaccaccaacaucaugaucaccacgaucaucaucgugaucaucgucauccuccugagccugaucgccgugggccuccugcuguacugcaaggcccgguccaccccggugacccugagcaaggaccagcucuccgggaucaacaacaucgccuucagcaacugaggacuagucccuguucccagagcccacuuuuuuuucuuuuuuugaaauaaaauagccugucuuucagaucuaaaaaaaaaaaaaaaaaaaaaaaaaaaaaaaaaaaaaaaaaaaaaaaaaaaaaaaaaaaaaaaaaaaaaaaaaaaaaaaaaaaaaaaaaaaaaaaaaaaa

SEQ ID NO: 21599 - RNA, 1856 nt, Artificial Sequence
  mRNA product Design a-1 (A100) comprising derived and/or modified sequence from HRSV(A2)__F_DSCav1_mut4 (opt1)
aggagagucccgcagucggcguccagcggcucugcuuguucgugugugugucguugcaggccuuauucaagcuuaccauggagcugcucauccugaaggccaacgccaucaccaccauccugacggcggugaccuucugcuucgccagcggccagaacaucaccgaggaguucuaccaguccacgugcagcgccgucuccaagggguaccucagcgcccugcgcaccggcugguacaccuccgugaucaccaucgagcugagcaacaucaaggagaacaagugcaacgggaccgacgccaaggugaagcucaucaagcaggagcuggacaaguacaagaacgcggucacggagcugcagcuccugaugcaguccacccccgccaccggcagcggguccgccaucugcagcggcguggccgugugcaagguccugcaccucgagggcgaggugaacaagaucaaguccgcgcugcugagcaccaacaaggccguggucucccucagcaacgggguguccgugcugacguucaagguccuggaccucaagaacuacaucgacaagcagcugcugccgauccucaacaagcagagcugcuccaucagcaacaucgagaccgugaucgaguuccagcagaagaacaaccggcugcuggagaucacccgcgaguucuccgugaacgccggcgucaccacgcccgugagcaccuacaugcucaccaacagcgagcugcugucccucaucaacgacaugcccaucaccaacgaccagaagaagcugaugagcaacaacgugcagaucguccggcagcaguccuacagcaucaugugcaucaucaaggaggaggugcuggccuacgugguccagcucccccuguacggggugaucgacacgccgugcuggaagcugcacaccagcccccucugcaccaccaacacgaaggagggcagcaacaucugccugacccgcaccgaccgggggugguacugcgacaacgccggcuccgugagcuucuucccccaggcggagaccugcaagguccaguccaaccgcguguucugcgacacgaugaacagccggacccugcccuccgaggucaaccucugcaacguggacaucuucaacccgaaguacgacugcaagaucaugaccagcaagaccgacguguccagcuccgucaucacgagccugggcgccaucguguccugcuacgggaagaccaagugcaccgccagcaacaagaaccgcggcaucaucaagaccuucuccaacgggugcgacuacgugagcaacaagggcgucgacacggugagcgugggcaacacccuguacugcgucaacaagcaggaggggaagucccucuacgugaagggcgagcccaucaucaacuucuacgacccccugguguuccccagcgacgaguucgacgccuccaucagccaggucaacgagaagaucaaccagucccuggccuucauccggaaguccgacgagcuccugcacaacgugaacgcggggaaguccaccaccaacaucaugaucaccacgaucaucaucgugaucaucgucauccugcucagccugaucgccgugggccugcugcucuacugcaaggcccgcuccaccccggugacccugagcaaggaccagcuguccgggaucaacaacaucgccuucagcaacugaggacuagucccuguucccagagcccacuuuuuuuucuuuuuuugaaauaaaauagccugucuuucagaucuaaaaaaaaaaaaaaaaaaaaaaaaaaaaaaaaaaaaaaaaaaaaaaaaaaaaaaaaaaaaaaaaaaaaaaaaaaaaaaaaaaaaaaaaaaaaaaaaaaaa

SEQ ID NO: 21600 - RNA, 1793 nt, Artificial Sequence
  mRNA product Design a-1 (A100) comprising derived and/or modified sequence from HRSV(A2)__F-del_DSCav1_mut4 (opt1)
aggagagucccgcagucggcguccagcggcucugcuuguucgugugugugucguugcaggccuuauucaagcuuaccauggagcugcucauccugaaggccaacgccaucaccaccauccugacggcggugaccuucugcuucgccagcggccagaacaucaccgaggaguucuaccaguccacgugcagcgccgucuccaagggguaccucagcgcccugcggaccggcugguacaccuccgugaucaccaucgagcugagcaacaucaaggagaacaagugcaacgggaccgacgccaaggugaagcucaucaagcaggagcuggacaaguacaagaacgcggucacggagcugcagcuccugaugcaguccaccccggcaaccggcuccggcuccgccaucugcagcggcgucgccgugugcaaggugcugcaccucgagggggaggucaacaagaucaagagcgcccugcuguccaccaacaaggccguggugagccucuccaacggcgucagcgugcugaccuucaaggugcuggaccucaagaacuacaucgacaagcagcugcugcccauccugaacaagcagagcugcuccaucagcaacaucgagacggugaucgaguuccagcagaagaacaaccggcuccuggagaucacccgcgaguucagcgugaacgccggggucaccacccccguguccacguacaugcugaccaacagcgagcuccugucccugaucaacgacaugccgaucaccaacgaccagaagaagcucaugagcaacaacgugcagaucguccggcagcaguccuacagcaucaugugcaucaucaaggaggaggugcuggcguacgugguccagcugccccucuacggcgugaucgacacccccugcuggaagcugcacacgagcccccugugcaccaccaacaccaaggagggguccaacaucugccucacgcgcaccgaccggggcugguacugcgacaacgccggcagcgucuccuucuucccgcaggccgagaccugcaaggugcagagcaaccgcguguucugcgacaccaugaacucccggacgcugcccagcgagguaaaccucugcaacgucgacaucuucaaccccaaguacgacugcaagaucaugaccuccaagaccgacgugagcuccagcgugaucaccucccugggggccaucgucagcugcuacggcaagacgaagugcaccgccagcaacaagaaccgggggaucaucaagaccuucuccaacggcugcgacuacgugagcaacaagggcguggacaccguguccgucgggaacacccuguacugcgugaacaagcaggagggcaagagccucuacgugaagggggagcccaucaucaacuucuacgacccgcuggucuuccccuccgacgaguucgacgcgagcaucucccaggugaacgagaagaucaaccagagccuggccuucauccgcaaguccgacgagcugcuccacaacgugaacgccggcaagagcacgaccaacaucaugaucaccaccaucaucaucgucaucaucgugauccugcugucccucaucgccguggggcugcugcucuacugcaaggcccggugaggacuagucccuguucccagagcccacuuuuuuuucuuuuuuugaaauaaaauagccugucuuucagaucuaaaaaaaaaaaaaaaaaaaaaaaaaaaaaaaaaaaaaaaaaaaaaaaaaaaaaaaaaaaaaaaaaaaaaaaaaaaaaaaaaaaaaaaaaaaaaaaaaaaa

SEQ ID NO: 21601 - RNA, 1793 nt, Artificial Sequence
  mRNA product Design a-1 (A100) comprising derived and/or modified sequence from HRSV(A2)__F-del_DSCav1_mut4 (opt1)
aggagagucccgcagucggcguccagcggcucugcuuguucgugugugugucguugcaggccuuauucaagcuuaccauggagcugcucauccugaaggccaacgccaucaccaccauccugacggcggugaccuucugcuucgccagcggccagaacaucaccgaggaguucuaccaguccacgugcagcgccgucuccaagggguaccucagcgcccugcgcaccggcugguacaccuccgugaucaccaucgagcugagcaacaucaaggagaacaagugcaacgggaccgacgccaaggugaagcucaucaagcaggagcuggacaaguacaagaacgcggucacggagcugcagcuccugaugcaguccacccccgccaccggcagcggguccgccaucugcagcggcguggccgugugcaagguccugcaccucgagggcgaggugaacaagaucaaguccgcgcugcugagcaccaacaaggccguggucucccucagcaacgggguguccgugcugacguucaagguccuggaccucaagaacuacaucgacaagcagcugcugccgauccucaacaagcagagcugcuccaucagcaacaucgagaccgugaucgaguuccagcagaagaacaaccggcugcuggagaucacccgcgaguucuccgugaacgccggcgucaccacgcccgugagcaccuacaugcucaccaacagcgagcugcugucccucaucaacgacaugcccaucaccaacgaccagaagaagcugaugagcaacaacgugcagaucguccggcagcaguccuacagcaucaugugcaucaucaaggaggaggugcuggccuacgugguccagcucccccuguacggggugaucgacacgccgugcuggaagcugcacaccagcccccucugcaccaccaacacgaaggagggcuccaacaucugccugacccgcaccgaccgggggugguacugcgacaacgccggcuccgugagcuucuucccccaggcggagaccugcaagguccaguccaaccgcguguucugcgacacgaugaacagccggacccuccccuccgaggucaaccugugcaacguggacaucuucaacccgaaguacgacugcaagaucaugaccagcaagaccgacguguccagcuccgucaucacgagccugggcgccaucguguccugcuacgggaagaccaagugcaccgccagcaacaagaaccggggcaucaucaagaccuucuccaacgggugcgacuacgugagcaacaagggcgucgacacggugagcgugggcaacacccucuacugcgucaacaagcaggaggggaagucccuguacgugaagggcgagcccaucaucaacuucuacgacccccugguguuccccagcgacgaguucgacgccuccaucagccaggucaacgagaagaucaaccagucccucgccuucauccgcaagagcgacgagcugcugcacaacgugaacgcggggaaguccaccaccaacaucaugaucaccacgaucaucaucgugaucaucgucauccuccugagccugaucgccgugggccuccugcuguacugcaaggcccggugaggacuagucccuguucccagagcccacuuuuuuuucuuuuuuugaaauaaaauagccugucuuucagaucuaaaaaaaaaaaaaaaaaaaaaaaaaaaaaaaaaaaaaaaaaaaaaaaaaaaaaaaaaaaaaaaaaaaaaaaaaaaaaaaaaaaaaaaaaaaaaaaaaaaa

SEQ ID NO: 21602 - RNA, 1793 nt, Artificial Sequence
  mRNA product Design a-1 (A100) comprising derived and/or modified sequence from HRSV(A2)__F-del_DSCav1_mut4 (opt1)
aggagagucccgcagucggcguccagcggcucugcuuguucgugugugugucguugcaggccuuauucaagcuuaccauggagcugcucauccugaaggccaacgccaucaccaccauccugacggcggugaccuucugcuucgccagcggccagaacaucaccgaggaguucuaccaguccacgugcagcgccgucuccaagggguaccucagcgcccugcgcaccggcugguacaccuccgugaucaccaucgagcugagcaacaucaaggagaacaagugcaacgggaccgacgccaaggugaagcucaucaagcaggagcuggacaaguacaagaacgcggucacggagcugcagcuccugaugcaguccacccccgccaccggcagcggguccgccaucugcagcggcguggccgugugcaagguccugcaccucgagggcgaggugaacaagaucaaguccgcgcugcugagcaccaacaaggccguggucucccucagcaacgggguguccgugcugacguucaagguccuggaccucaagaacuacaucgacaagcagcugcugccgauccucaacaagcagagcugcuccaucagcaacaucgagaccgugaucgaguuccagcagaagaacaaccggcugcuggagaucacccgcgaguucuccgugaacgccggcgucaccacgcccgugagcaccuacaugcucaccaacagcgagcugcugucccucaucaacgacaugcccaucaccaacgaccagaagaagcugaugagcaacaacgugcagaucguccggcagcaguccuacagcaucaugugcaucaucaaggaggaggugcuggccuacgugguccagcucccccuguacggggugaucgacacgccgugcuggaagcugcacaccagcccccucugcaccaccaacacgaaggagggcagcaacaucugccugacccgcaccgaccgggggugguacugcgacaacgccggcuccgugagcuucuucccccaggcggagaccugcaagguccaguccaaccgcguguucugcgacacgaugaacagccggacccugcccuccgaggucaaccucugcaacguggacaucuucaacccgaaguacgacugcaagaucaugaccagcaagaccgacguguccagcuccgucaucacgagccugggcgccaucguguccugcuacgggaagaccaagugcaccgccagcaacaagaaccgcggcaucaucaagaccuucuccaacgggugcgacuacgugagcaacaagggcgucgacacggugagcgugggcaacacccuguacugcgucaacaagcaggaggggaagucccucuacgugaagggcgagcccaucaucaacuucuacgacccccugguguuccccagcgacgaguucgacgccuccaucagccaggucaacgagaagaucaaccagucccuggccuucauccggaaguccgacgagcuccugcacaacgugaacgcggggaaguccaccaccaacaucaugaucaccacgaucaucaucgugaucaucgucauccugcucagccugaucgccgugggccugcugcucuacugcaaggcccgcugaggacuagucccuguucccagagcccacuuuuuuuucuuuuuuugaaauaaaauagccugucuuucagaucuaaaaaaaaaaaaaaaaaaaaaaaaaaaaaaaaaaaaaaaaaaaaaaaaaaaaaaaaaaaaaaaaaaaaaaaaaaaaaaaaaaaaaaaaaaaaaaaaaaaa

SEQ ID NO: 21603 - RNA, 1859 nt, Artificial Sequence
  mRNA product Design a-1 (A100) comprising derived and/or modified sequence from HRSV(A2)__F_DSCav1_mut5 (opt1)
aggagagucccgcagucggcguccagcggcucugcuuguucgugugugugucguugcaggccuuauucaagcuuaccauggagcugcucauccugaaggccaacgccaucaccaccauccugacggcggugaccuucugcuucgccagcggccagaacaucaccgaggaguucuaccaguccacgugcagcgccgucuccaagggguaccucagcgcccugcggaccggcugguacaccuccgugaucaccaucgagcugagcaacaucaaggagaacaagugcaacgggaccgacgccaaggugaagcucaucaagcaggagcuggacaaguacaagaacgcggucacggagcugcagcuccugaugcaguccaccccggcaaccggcuccggcuccgccaucgcgagcggcgucgccgugugcaaggugcugcaccucgagggggaggucaacaagaucaagagcgcccugcuguccaccaacaaggccguggugagccucuccggcugcggcgucagcgugcugaccuucaaggugcuggaccucaagaacuacaucgacaagcagcugcugcccauccugaacaagcagagcugcuccaucagcaacaucgagacggugaucgaguuccagcagaagaacaaccggcuccuggagaucacccgcgaguucagcgugaacgccggggucaccacccccguguccacguacaugcugaccaacagcgagcuccugucccugaucaacgacaugccgaucaccaacgaccagaagaagcucaugagcaacaacgugcagaucguccggcagcaguccuacagcaucaugugcaucaucaaggaggaggugcuggcguacgugguccagcugccccucuacggcgugaucgacacccccugcuggaagcugcacacgagcccccugugcaccaccaacaccaaggagggguccaacaucugccucacgcgcaccgaccggggcugguacugcgacaacgccggcagcgucuccuucuucccgcaggccgagaccugcaaggugcagagcaaccgcguguucugcgacaccaugaacucccggacgcugcccagcgagguaaaccucugcaacgucgacaucuucaaccccaaguacgacugcaagaucaugaccuccaagaccgacgugagcuccagcgugaucaccucccugggggccaucgucagcugcuacggcaagacgaagugcaccgccagcaacaagugccgggggaucaucaagaccuucuccaacggcugcgacuacgugagcaacaagggcguggacaccguguccgucgggaacacccuguacuacgugaacaagcaggagggcaagagccucuacgugaagggggagcccaucaucaacuucuacgacccgcuggucuuccccuccgacgaguucgacgcgagcaucucccaggugaacgagaagaucaaccagagccuggccuucauccgcaaguccgacgagcugcuccacaacgugaacgccggcaagagcacgaccaacaucaugaucaccaccaucaucaucgucaucaucgugauccugcugucccucaucgccguggggcugcugcucuacugcaaggcccggagcacgcccgucacccuguccaaggaccagcugagcggcaucaacaacaucgcguucuccaacugaggacuagucccuguucccagagcccacuuuuuuuucuuuuuuugaaauaaaauagccugucuuucagaucuaaaaaaaaaaaaaaaaaaaaaaaaaaaaaaaaaaaaaaaaaaaaaaaaaaaaaaaaaaaaaaaaaaaaaaaaaaaaaaaaaaaaaaaaaaaaaaaaaaaa

SEQ ID NO: 21604 - RNA, 1859 nt, Artificial Sequence
  mRNA product Design a-1 (A100) comprising derived and/or modified sequence from HRSV(A2)__F_DSCav1_mut5 (opt1)
aggagagucccgcagucggcguccagcggcucugcuuguucgugugugugucguugcaggccuuauucaagcuuaccauggagcugcucauccugaaggccaacgccaucaccaccauccugacggcggugaccuucugcuucgccagcggccagaacaucaccgaggaguucuaccaguccacgugcagcgccgucuccaagggguaccucagcgcccugcgcaccggcugguacaccuccgugaucaccaucgagcugagcaacaucaaggagaacaagugcaacgggaccgacgccaaggugaagcucaucaagcaggagcuggacaaguacaagaacgcggucacggagcugcagcuccugaugcaguccacccccgccaccggcagcggguccgccaucgccagcggcguggcggugugcaagguccugcaccucgagggcgaggugaacaagaucaaguccgcccugcugagcaccaacaaggccguggucucccucagcgggugcggcguguccgugcugacguucaagguccuggaccucaagaacuacaucgacaagcagcugcugccgauccucaacaagcagagcugcuccaucagcaacaucgagaccgugaucgaguuccagcagaagaacaaccggcugcuggagaucacccgcgaguucuccgugaacgccggggucaccacgcccgugagcaccuacaugcucaccaacagcgagcugcugucccucaucaacgacaugcccaucaccaacgaccagaagaagcugaugagcaacaacgugcagaucguccggcagcaguccuacagcaucaugugcaucaucaaggaggaggugcuggccuacgugguccagcucccccuguacggcgugaucgacacgccgugcuggaagcugcacaccagcccccucugcaccaccaacacgaaggagggguccaacaucugccugacccgcaccgaccggggcugguacugcgacaacgcgggcuccgugagcuucuucccccaggccgagaccugcaagguccaguccaaccgcguguucugcgacacgaugaacagccggacccuccccuccgaggucaaccugugcaacguggacaucuucaacccgaaguacgacugcaagaucaugaccagcaagaccgacguguccagcuccgucaucacgagccugggggccaucguguccugcuacggcaagaccaagugcaccgccagcaacaagugccgggggaucaucaagaccuucuccaacggcugcgacuacgugagcaacaagggcgucgacacggugagcguggggaacacccucuacuacgucaacaagcaggagggcaagucccuguacgugaagggggagcccaucaucaacuucuacgacccccugguguuccccagcgacgaguucgacgccuccaucagccaggucaacgagaagaucaaccagucccucgcguucauccgcaagagcgacgagcugcugcacaacgugaacgccggcaaguccaccaccaacaucaugaucaccacgaucaucaucgugaucaucgucauccuccugagccugaucgccguggggcuccugcuguacugcaaggcccgguccaccccggugacccugagcaaggaccagcucuccggcaucaacaacaucgccuucagcaacugaggacuagucccuguucccagagcccacuuuuuuuucuuuuuuugaaauaaaauagccugucuuucagaucuaaaaaaaaaaaaaaaaaaaaaaaaaaaaaaaaaaaaaaaaaaaaaaaaaaaaaaaaaaaaaaaaaaaaaaaaaaaaaaaaaaaaaaaaaaaaaaaaaaaa

SEQ ID NO: 21605 - RNA, 1859 nt, Artificial Sequence
  mRNA product Design a-1 (A100) comprising derived and/or modified sequence from HRSV(A2)__F_DSCav1_mut5 (opt1)
aggagagucccgcagucggcguccagcggcucugcuuguucgugugugugucguugcaggccuuauucaagcuuaccauggagcugcucauccugaaggccaacgccaucaccaccauccugacggcggugaccuucugcuucgccagcggccagaacaucaccgaggaguucuaccaguccacgugcagcgccgucuccaagggguaccucagcgcccugcgcaccggcugguacaccuccgugaucaccaucgagcugagcaacaucaaggagaacaagugcaacgggaccgacgccaaggugaagcucaucaagcaggagcuggacaaguacaagaacgcggucacggagcugcagcuccugaugcaguccacccccgccaccggcagcggguccgccaucgccagcggcguggcggugugcaagguccugcaccucgagggcgaggugaacaagaucaaguccgcccugcugagcaccaacaaggccguggucucccucagcgggugcggcguguccgugcugacguucaagguccuggaccucaagaacuacaucgacaagcagcugcugccgauccucaacaagcagagcugcuccaucagcaacaucgagaccgugaucgaguuccagcagaagaacaaccggcugcuggagaucacccgcgaguucuccgugaacgccggggucaccacgcccgugagcaccuacaugcucaccaacagcgagcugcugucccucaucaacgacaugcccaucaccaacgaccagaagaagcugaugagcaacaacgugcagaucguccggcagcaguccuacagcaucaugugcaucaucaaggaggaggugcuggccuacgugguccagcucccccuguacggcgugaucgacacgccgugcuggaagcugcacaccagcccccucugcaccaccaacacgaaggaggggagcaacaucugccugacccgcaccgaccggggcugguacugcgacaacgcgggcuccgugagcuucuucccccaggccgagaccugcaagguccaguccaaccgcguguucugcgacacgaugaacagccggacccugcccuccgaggucaaccucugcaacguggacaucuucaacccgaaguacgacugcaagaucaugaccagcaagaccgacguguccagcuccgucaucacgagccugggggccaucguguccugcuacggcaagaccaagugcaccgccagcaacaagugccgcgggaucaucaagaccuucuccaacggcugcgacuacgugagcaacaagggcgucgacacggugagcguggggaacacccuguacuacgucaacaagcaggagggcaagucccucuacgugaagggggagcccaucaucaacuucuacgacccccugguguuccccagcgacgaguucgacgccuccaucagccaggucaacgagaagaucaaccagucccuggcguucauccggaaguccgacgagcuccugcacaacgugaacgccggcaaguccaccaccaacaucaugaucaccacgaucaucaucgugaucaucgucauccugcucagccugaucgccguggggcugcugcucuacugcaaggcccgcuccaccccggugacccugagcaaggaccagcuguccggcaucaacaacaucgccuucagcaacugaggacuagucccuguucccagagcccacuuuuuuuucuuuuuuugaaauaaaauagccugucuuucagaucuaaaaaaaaaaaaaaaaaaaaaaaaaaaaaaaaaaaaaaaaaaaaaaaaaaaaaaaaaaaaaaaaaaaaaaaaaaaaaaaaaaaaaaaaaaaaaaaaaaaa

SEQ ID NO: 21606 - RNA, 1796 nt, Artificial Sequence
  mRNA product Design a-1 (A100) comprising derived and/or modified sequence from HRSV(A2)__F-del_DSCav1_mut5 (opt1)
aggagagucccgcagucggcguccagcggcucugcuuguucgugugugugucguugcaggccuuauucaagcuuaccauggagcugcucauccugaaggccaacgccaucaccaccauccugacggcggugaccuucugcuucgccagcggccagaacaucaccgaggaguucuaccaguccacgugcagcgccgucuccaagggguaccucagcgcccugcggaccggcugguacaccuccgugaucaccaucgagcugagcaacaucaaggagaacaagugcaacgggaccgacgccaaggugaagcucaucaagcaggagcuggacaaguacaagaacgcggucacggagcugcagcuccugaugcaguccaccccggcaaccggcuccggcuccgccaucgcgagcggcgucgccgugugcaaggugcugcaccucgagggggaggucaacaagaucaagagcgcccugcuguccaccaacaaggccguggugagccucuccggcugcggcgucagcgugcugaccuucaaggugcuggaccucaagaacuacaucgacaagcagcugcugcccauccugaacaagcagagcugcuccaucagcaacaucgagacggugaucgaguuccagcagaagaacaaccggcuccuggagaucacccgcgaguucagcgugaacgccggggucaccacccccguguccacguacaugcugaccaacagcgagcuccugucccugaucaacgacaugccgaucaccaacgaccagaagaagcucaugagcaacaacgugcagaucguccggcagcaguccuacagcaucaugugcaucaucaaggaggaggugcuggcguacgugguccagcugccccucuacggcgugaucgacacccccugcuggaagcugcacacgagcccccugugcaccaccaacaccaaggagggguccaacaucugccucacgcgcaccgaccggggcugguacugcgacaacgccggcagcgucuccuucuucccgcaggccgagaccugcaaggugcagagcaaccgcguguucugcgacaccaugaacucccggacgcugcccagcgagguaaaccucugcaacgucgacaucuucaaccccaaguacgacugcaagaucaugaccuccaagaccgacgugagcuccagcgugaucaccucccugggggccaucgucagcugcuacggcaagacgaagugcaccgccagcaacaagugccgggggaucaucaagaccuucuccaacggcugcgacuacgugagcaacaagggcguggacaccguguccgucgggaacacccuguacuacgugaacaagcaggagggcaagagccucuacgugaagggggagcccaucaucaacuucuacgacccgcuggucuuccccuccgacgaguucgacgcgagcaucucccaggugaacgagaagaucaaccagagccuggccuucauccgcaaguccgacgagcugcuccacaacgugaacgccggcaagagcacgaccaacaucaugaucaccaccaucaucaucgucaucaucgugauccugcugucccucaucgccguggggcugcugcucuacugcaaggcccggugaggacuagucccuguucccagagcccacuuuuuuuucuuuuuuugaaauaaaauagccugucuuucagaucuaaaaaaaaaaaaaaaaaaaaaaaaaaaaaaaaaaaaaaaaaaaaaaaaaaaaaaaaaaaaaaaaaaaaaaaaaaaaaaaaaaaaaaaaaaaaaaaaaaaa

SEQ ID NO: 21607 - RNA, 1796 nt, Artificial Sequence
  mRNA product Design a-1 (A100) comprising derived and/or modified sequence from HRSV(A2)__F-del_DSCav1_mut5 (opt1)
aggagagucccgcagucggcguccagcggcucugcuuguucgugugugugucguugcaggccuuauucaagcuuaccauggagcugcucauccugaaggccaacgccaucaccaccauccugacggcggugaccuucugcuucgccagcggccagaacaucaccgaggaguucuaccaguccacgugcagcgccgucuccaagggguaccucagcgcccugcgcaccggcugguacaccuccgugaucaccaucgagcugagcaacaucaaggagaacaagugcaacgggaccgacgccaaggugaagcucaucaagcaggagcuggacaaguacaagaacgcggucacggagcugcagcuccugaugcaguccacccccgccaccggcagcggguccgccaucgccagcggcguggcggugugcaagguccugcaccucgagggcgaggugaacaagaucaaguccgcccugcugagcaccaacaaggccguggucucccucagcgggugcggcguguccgugcugacguucaagguccuggaccucaagaacuacaucgacaagcagcugcugccgauccucaacaagcagagcugcuccaucagcaacaucgagaccgugaucgaguuccagcagaagaacaaccggcugcuggagaucacccgcgaguucuccgugaacgccggggucaccacgcccgugagcaccuacaugcucaccaacagcgagcugcugucccucaucaacgacaugcccaucaccaacgaccagaagaagcugaugagcaacaacgugcagaucguccggcagcaguccuacagcaucaugugcaucaucaaggaggaggugcuggccuacgugguccagcucccccuguacggcgugaucgacacgccgugcuggaagcugcacaccagcccccucugcaccaccaacacgaaggagggguccaacaucugccugacccgcaccgaccggggcugguacugcgacaacgcgggcuccgugagcuucuucccccaggccgagaccugcaagguccaguccaaccgcguguucugcgacacgaugaacagccggacccuccccuccgaggucaaccugugcaacguggacaucuucaacccgaaguacgacugcaagaucaugaccagcaagaccgacguguccagcuccgucaucacgagccugggggccaucguguccugcuacggcaagaccaagugcaccgccagcaacaagugccgggggaucaucaagaccuucuccaacggcugcgacuacgugagcaacaagggcgucgacacggugagcguggggaacacccucuacuacgucaacaagcaggagggcaagucccuguacgugaagggggagcccaucaucaacuucuacgacccccugguguuccccagcgacgaguucgacgccuccaucagccaggucaacgagaagaucaaccagucccucgcguucauccgcaagagcgacgagcugcugcacaacgugaacgccggcaaguccaccaccaacaucaugaucaccacgaucaucaucgugaucaucgucauccuccugagccugaucgccguggggcuccugcuguacugcaaggcccggugaggacuagucccuguucccagagcccacuuuuuuuucuuuuuuugaaauaaaauagccugucuuucagaucuaaaaaaaaaaaaaaaaaaaaaaaaaaaaaaaaaaaaaaaaaaaaaaaaaaaaaaaaaaaaaaaaaaaaaaaaaaaaaaaaaaaaaaaaaaaaaaaaaaaa

SEQ ID NO: 21608 - RNA, 1796 nt, Artificial Sequence
  mRNA product Design a-1 (A100) comprising derived and/or modified sequence from HRSV(A2)__F-del_DSCav1_mut5 (opt1)
aggagagucccgcagucggcguccagcggcucugcuuguucgugugugugucguugcaggccuuauucaagcuuaccauggagcugcucauccugaaggccaacgccaucaccaccauccugacggcggugaccuucugcuucgccagcggccagaacaucaccgaggaguucuaccaguccacgugcagcgccgucuccaagggguaccucagcgcccugcgcaccggcugguacaccuccgugaucaccaucgagcugagcaacaucaaggagaacaagugcaacgggaccgacgccaaggugaagcucaucaagcaggagcuggacaaguacaagaacgcggucacggagcugcagcuccugaugcaguccacccccgccaccggcagcggguccgccaucgccagcggcguggcggugugcaagguccugcaccucgagggcgaggugaacaagaucaaguccgcccugcugagcaccaacaaggccguggucucccucagcgggugcggcguguccgugcugacguucaagguccuggaccucaagaacuacaucgacaagcagcugcugccgauccucaacaagcagagcugcuccaucagcaacaucgagaccgugaucgaguuccagcagaagaacaaccggcugcuggagaucacccgcgaguucuccgugaacgccggggucaccacgcccgugagcaccuacaugcucaccaacagcgagcugcugucccucaucaacgacaugcccaucaccaacgaccagaagaagcugaugagcaacaacgugcagaucguccggcagcaguccuacagcaucaugugcaucaucaaggaggaggugcuggccuacgugguccagcucccccuguacggcgugaucgacacgccgugcuggaagcugcacaccagcccccucugcaccaccaacacgaaggaggggagcaacaucugccugacccgcaccgaccggggcugguacugcgacaacgcgggcuccgugagcuucuucccccaggccgagaccugcaagguccaguccaaccgcguguucugcgacacgaugaacagccggacccugcccuccgaggucaaccucugcaacguggacaucuucaacccgaaguacgacugcaagaucaugaccagcaagaccgacguguccagcuccgucaucacgagccugggggccaucguguccugcuacggcaagaccaagugcaccgccagcaacaagugccgcgggaucaucaagaccuucuccaacggcugcgacuacgugagcaacaagggcgucgacacggugagcguggggaacacccuguacuacgucaacaagcaggagggcaagucccucuacgugaagggggagcccaucaucaacuucuacgacccccugguguuccccagcgacgaguucgacgccuccaucagccaggucaacgagaagaucaaccagucccuggcguucauccggaaguccgacgagcuccugcacaacgugaacgccggcaaguccaccaccaacaucaugaucaccacgaucaucaucgugaucaucgucauccugcucagccugaucgccguggggcugcugcucuacugcaaggcccgcugaggacuagucccuguucccagagcccacuuuuuuuucuuuuuuugaaauaaaauagccugucuuucagaucuaaaaaaaaaaaaaaaaaaaaaaaaaaaaaaaaaaaaaaaaaaaaaaaaaaaaaaaaaaaaaaaaaaaaaaaaaaaaaaaaaaaaaaaaaaaaaaaaaaaa

SEQ ID NO: 21609 - RNA, 1856 nt, Artificial Sequence
  mRNA product Design a-1 (A100) comprising derived and/or modified sequence from HRSV(A2)__F_DSCav1_mut6 (opt1)
aggagagucccgcagucggcguccagcggcucugcuuguucgugugugugucguugcaggccuuauucaagcuuaccauggagcugcucauccugaaggccaacgccaucaccaccauccugacggcggugaccuucugcuucgccagcggccagaacaucaccgaggaguucuaccaguccacgugcagcgccgucuccaagggguaccucggcgcccugcggaccggcugguacaccuccgugaucaccaucgagcugagcaacaucaaggagaacaagugcaacgggaccgacgccaaggugaagcucaucaagcaggagcuggacaaguacaagaacgcggucacggaccugcagaugcugaugugcuccaccccggcaaccggcuccggcuccgccaucgcgagcggcgucgccgugugcaaggugcugcaccucgagggggaggucaacaagaucaagagcgcccugcuguccaccaacaaggccguggugagccucuccaacggcgucagcgugcugaccuucaaggugcuggaccucaagaacuacaucgacaagcagcugcugcccauccugaacaagcagagcugcuccauccccaaccccgagacggugauggaguuccagcagaagaacaaccggcuccuggagaucacccgcgaguucagcgugaacgccggggucaccacccccguguccacguacaugcugaccaacagcgagcuccugucccugaucaacgacaugccgaucaccaacgaccagaagaagcucaugagcaacaacgugcagaucguccggcagcaguccuacagcaucaugugcaucaucaaggaggaggugcuggcguacgugguccagcugccccucuacggcgugaucgacacccccugcuggaagcugcacacgagcccccugugcaccaccaacaccaaggagggguccaacaucugccucacgcgcaccgaccggggcugguacugcgacaacgccggcagcgucuccuucuucccgcaggccgagaccugcaaggugugcagcaaccgcguguucugcgacaccaugaacucccugacgcugcccagcgagguaaaccucugcaacgucgacaucuucaaccccaaguacgacugcaagaucaugaccuccaagaccgacgugagcuccagcgugaucaccucccugggggccaucgucagcugcuacggcaagacgaagugcaccgccagcaacaagaacaaggggaucaucaagaccuucuccaacggcugcgacuacgugagcaacaagggcguggacaccguguccgucgggaacacccuguacuacgugaacaagcaggagggccagagccucuacgugaagggggagcccaucaucaacuucuacgacccgcuggucuuccccuccgacgaguucgacgcgagcaucucccaggugaacgagaagaucaaccagagccuggccuucauccgcaaguccgacgagcugcuccacaacgugaacgccggcaagagcacgaccaacaucaugaucaccaccaucaucaucgucaucaucgugauccugcugucccucaucgccguggggcugcugcucuacugcaaggcccggagcacgcccgucacccuguccaaggaccagcugagcggcaucaacaacaucgcguucuccaacugaggacuagucccuguucccagagcccacuuuuuuuucuuuuuuugaaauaaaauagccugucuuucagaucuaaaaaaaaaaaaaaaaaaaaaaaaaaaaaaaaaaaaaaaaaaaaaaaaaaaaaaaaaaaaaaaaaaaaaaaaaaaaaaaaaaaaaaaaaaaaaaaaaaaa

SEQ ID NO: 21610 - RNA, 1856 nt, Artificial Sequence
  mRNA product Design a-1 (A100) comprising derived and/or modified sequence from HRSV(A2)__F_DSCav1_mut6 (opt1)
aggagagucccgcagucggcguccagcggcucugcuuguucgugugugugucguugcaggccuuauucaagcuuaccauggagcugcucauccugaaggccaacgccaucaccaccauccugacggcggugaccuucugcuucgccagcggccagaacaucaccgaggaguucuaccaguccacgugcagcgccgucuccaagggguaccucggcgcccugcgcaccgggugguacaccagcgugaucaccaucgagcuguccaacaucaaggagaacaagugcaacggcaccgacgccaaggugaagcucaucaagcaggagcuggacaaguacaagaacgcggucacggaccugcagaugcucaugugcagcacccccgccaccggguccggcagcgccaucgccuccggcguggcggugugcaagguccugcaccuggagggggaggugaacaagaucaagagcgcccuccuguccaccaacaaggccguggucagccuguccaacggcgugagcgugcucacguucaagguccuggaccugaagaacuacaucgacaagcagcuccugccgauccugaacaagcaguccugcagcauccccaaccccgagaccgugauggaguuccagcagaagaacaaccggcuccuggagaucacccgcgaguucuccgugaacgccggggucaccacgcccgugagcaccuacaugcugaccaacuccgagcuccugagccugaucaacgacaugccgaucaccaacgaccagaagaagcucaugagcaacaacgugcagaucguccggcagcaguccuacagcaucaugugcaucaucaaggaggaggugcuggccuacgugguccagcugccccucuacggcgugaucgacacgcccugcuggaagcugcacaccagcccccugugcaccaccaacacgaaggaggggagcaacaucugccucacccgcaccgaccggggcugguacugcgacaacgcgggcuccgugagcuucuucccgcaggccgagaccugcaaggucugcuccaaccgcguguucugcgacacgaugaacagccugacccugcccuccgaggucaaccucugcaacguggacaucuucaaccccaaguacgacugcaagaucaugaccagcaagaccgacguguccagcuccgucaucacgagccugggggccaucguguccugcuacggcaagaccaagugcaccgccagcaacaagaacaaggggaucaucaagaccuucuccaacggcugcgacuacgugagcaacaagggcgucgacacgguguccguggggaacacccuguacuacgucaacaagcaggagggccagagccucuacgugaagggggagcccaucaucaacuucuacgacccgcugguguuccccagcgacgaguucgacgccuccaucagccaggucaacgagaagaucaaccagucccuggcguucauccggaaguccgacgagcuccugcacaacgugaacgccggcaaguccaccaccaacaucaugaucaccacgaucaucaucgugaucaucgucauccugcucagccugaucgccguggggcugcuccuguacugcaaggcccgcuccacccccgugacccugagcaaggaccagcuguccggcaucaacaacaucgccuucagcaacugaggacuagucccuguucccagagcccacuuuuuuuucuuuuuuugaaauaaaauagccugucuuucagaucuaaaaaaaaaaaaaaaaaaaaaaaaaaaaaaaaaaaaaaaaaaaaaaaaaaaaaaaaaaaaaaaaaaaaaaaaaaaaaaaaaaaaaaaaaaaaaaaaaaaa

SEQ ID NO: 21611 - RNA, 1856 nt, Artificial Sequence
  mRNA product Design a-1 (A100) comprising derived and/or modified sequence from HRSV(A2)__F_DSCav1_mut6 (opt1)
aggagagucccgcagucggcguccagcggcucugcuuguucgugugugugucguugcaggccuuauucaagcuuaccauggagcugcucauccugaaggccaacgccaucaccaccauccugacggcggugaccuucugcuucgccagcggccagaacaucaccgaggaguucuaccaguccacgugcagcgccgucuccaagggguaccucggcgcccugcgcaccgggugguacaccagcgugaucaccaucgagcuguccaacaucaaggagaacaagugcaacggcaccgacgccaaggugaagcucaucaagcaggagcuggacaaguacaagaacgcggucacggaccugcagaugcucaugugcagcacccccgccaccggguccggcagcgccaucgccuccggcguggcggugugcaagguccugcaccuggagggggaggugaacaagaucaagagcgcccuccuguccaccaacaaggccguggucagccuguccaacggcgugagcgugcucacguucaagguccuggaccugaagaacuacaucgacaagcagcuccugccgauccugaacaagcaguccugcagcauccccaaccccgagaccgugauggaguuccagcagaagaacaaccggcuccuggagaucacccgcgaguucuccgugaacgccggggucaccacgcccgugagcaccuacaugcugaccaacuccgagcuccugagccugaucaacgacaugccgaucaccaacgaccagaagaagcucaugagcaacaacgugcagaucguccggcagcaguccuacagcaucaugugcaucaucaaggaggaggugcuggccuacgugguccagcugccccucuacggcgugaucgacacgcccugcuggaagcugcacaccagcccccugugcaccaccaacacgaaggaggggagcaacaucugccucacccgcaccgaccggggcugguacugcgacaacgcgggcuccgugagcuucuucccgcaggccgagaccugcaaggucugcuccaaccgcguguucugcgacacgaugaacagccugacccugcccuccgaggucaaccucugcaacguggacaucuucaaccccaaguacgacugcaagaucaugaccagcaagaccgacguguccagcuccgucaucacgagccugggggccaucguguccugcuacggcaagaccaagugcaccgccagcaacaagaacaaggggaucaucaagaccuucuccaacggcugcgacuacgugagcaacaagggcgucgacacgguguccguggggaacacccuguacuacgucaacaagcaggagggccagagccucuacgugaagggggagcccaucaucaacuucuacgacccgcugguguuccccagcgacgaguucgacgccuccaucagccaggucaacgagaagaucaaccagucccuggcguucauccggaaguccgacgagcuccugcacaacgugaacgccggcaaguccaccaccaacaucaugaucaccacgaucaucaucgugaucaucgucauccugcucagccugaucgccguggggcugcugcucuacugcaaggcccgcuccacccccgugacccugagcaaggaccagcuguccggcaucaacaacaucgccuucagcaacugaggacuagucccuguucccagagcccacuuuuuuuucuuuuuuugaaauaaaauagccugucuuucagaucuaaaaaaaaaaaaaaaaaaaaaaaaaaaaaaaaaaaaaaaaaaaaaaaaaaaaaaaaaaaaaaaaaaaaaaaaaaaaaaaaaaaaaaaaaaaaaaaaaaaa

SEQ ID NO: 21612 - RNA, 1793 nt, Artificial Sequence
  mRNA product Design a-1 (A100) comprising derived and/or modified sequence from HRSV(A2)__F-del_DSCav1_mut6 (opt1)
aggagagucccgcagucggcguccagcggcucugcuuguucgugugugugucguugcaggccuuauucaagcuuaccauggagcugcucauccugaaggccaacgccaucaccaccauccugacggcggugaccuucugcuucgccagcggccagaacaucaccgaggaguucuaccaguccacgugcagcgccgucuccaagggguaccucggcgcccugcggaccggcugguacaccuccgugaucaccaucgagcugagcaacaucaaggagaacaagugcaacgggaccgacgccaaggugaagcucaucaagcaggagcuggacaaguacaagaacgcggucacggaccugcagaugcugaugugcuccaccccggcaaccggcuccggcuccgccaucgcgagcggcgucgccgugugcaaggugcugcaccucgagggggaggucaacaagaucaagagcgcccugcuguccaccaacaaggccguggugagccucuccaacggcgucagcgugcugaccuucaaggugcuggaccucaagaacuacaucgacaagcagcugcugcccauccugaacaagcagagcugcuccauccccaaccccgagacggugauggaguuccagcagaagaacaaccggcuccuggagaucacccgcgaguucagcgugaacgccggggucaccacccccguguccacguacaugcugaccaacagcgagcuccugucccugaucaacgacaugccgaucaccaacgaccagaagaagcucaugagcaacaacgugcagaucguccggcagcaguccuacagcaucaugugcaucaucaaggaggaggugcuggcguacgugguccagcugccccucuacggcgugaucgacacccccugcuggaagcugcacacgagcccccugugcaccaccaacaccaaggagggguccaacaucugccucacgcgcaccgaccggggcugguacugcgacaacgccggcagcgucuccuucuucccgcaggccgagaccugcaaggugugcagcaaccgcguguucugcgacaccaugaacucccugacgcugcccagcgagguaaaccucugcaacgucgacaucuucaaccccaaguacgacugcaagaucaugaccuccaagaccgacgugagcuccagcgugaucaccucccugggggccaucgucagcugcuacggcaagacgaagugcaccgccagcaacaagaacaaggggaucaucaagaccuucuccaacggcugcgacuacgugagcaacaagggcguggacaccguguccgucgggaacacccuguacuacgugaacaagcaggagggccagagccucuacgugaagggggagcccaucaucaacuucuacgacccgcuggucuuccccuccgacgaguucgacgcgagcaucucccaggugaacgagaagaucaaccagagccuggccuucauccgcaaguccgacgagcugcuccacaacgugaacgccggcaagagcacgaccaacaucaugaucaccaccaucaucaucgucaucaucgugauccugcugucccucaucgccguggggcugcugcucuacugcaaggcccggugaggacuagucccuguucccagagcccacuuuuuuuucuuuuuuugaaauaaaauagccugucuuucagaucuaaaaaaaaaaaaaaaaaaaaaaaaaaaaaaaaaaaaaaaaaaaaaaaaaaaaaaaaaaaaaaaaaaaaaaaaaaaaaaaaaaaaaaaaaaaaaaaaaaaa

SEQ ID NO: 21613 - RNA, 1793 nt, Artificial Sequence
  mRNA product Design a-1 (A100) comprising derived and/or modified sequence from HRSV(A2)__F-del_DSCav1_mut6 (opt1)
aggagagucccgcagucggcguccagcggcucugcuuguucgugugugugucguugcaggccuuauucaagcuuaccauggagcugcucauccugaaggccaacgccaucaccaccauccugacggcggugaccuucugcuucgccagcggccagaacaucaccgaggaguucuaccaguccacgugcagcgccgucuccaagggguaccucggcgcccugcgcaccgggugguacaccagcgugaucaccaucgagcuguccaacaucaaggagaacaagugcaacggcaccgacgccaaggugaagcucaucaagcaggagcuggacaaguacaagaacgcggucacggaccugcagaugcucaugugcagcacccccgccaccggguccggcagcgccaucgccuccggcguggcggugugcaagguccugcaccuggagggggaggugaacaagaucaagagcgcccuccuguccaccaacaaggccguggucagccuguccaacggcgugagcgugcucacguucaagguccuggaccugaagaacuacaucgacaagcagcuccugccgauccugaacaagcaguccugcagcauccccaaccccgagaccgugauggaguuccagcagaagaacaaccggcuccuggagaucacccgcgaguucuccgugaacgccggggucaccacgcccgugagcaccuacaugcugaccaacuccgagcuccugagccugaucaacgacaugccgaucaccaacgaccagaagaagcucaugagcaacaacgugcagaucguccggcagcaguccuacagcaucaugugcaucaucaaggaggaggugcuggccuacgugguccagcugccccucuacggcgugaucgacacgcccugcuggaagcugcacaccagcccccugugcaccaccaacacgaaggaggggagcaacaucugccucacccgcaccgaccggggcugguacugcgacaacgcgggcuccgugagcuucuucccgcaggccgagaccugcaaggucugcuccaaccgcguguucugcgacacgaugaacagccugacccugcccuccgaggucaaccucugcaacguggacaucuucaaccccaaguacgacugcaagaucaugaccagcaagaccgacguguccagcuccgucaucacgagccugggggccaucguguccugcuacggcaagaccaagugcaccgccagcaacaagaacaaggggaucaucaagaccuucuccaacggcugcgacuacgugagcaacaagggcgucgacacgguguccguggggaacacccuguacuacgucaacaagcaggagggccagagccucuacgugaagggggagcccaucaucaacuucuacgacccgcugguguuccccagcgacgaguucgacgccuccaucagccaggucaacgagaagaucaaccagucccuggcguucauccggaaguccgacgagcuccugcacaacgugaacgccggcaaguccaccaccaacaucaugaucaccacgaucaucaucgugaucaucgucauccugcucagccugaucgccguggggcugcuccuguacugcaaggcccgcugaggacuagucccuguucccagagcccacuuuuuuuucuuuuuuugaaauaaaauagccugucuuucagaucuaaaaaaaaaaaaaaaaaaaaaaaaaaaaaaaaaaaaaaaaaaaaaaaaaaaaaaaaaaaaaaaaaaaaaaaaaaaaaaaaaaaaaaaaaaaaaaaaaaaa

SEQ ID NO: 21614 - RNA, 1793 nt, Artificial Sequence
  mRNA product Design a-1 (A100) comprising derived and/or modified sequence from HRSV(A2)__F-del_DSCav1_mut6 (opt1)
aggagagucccgcagucggcguccagcggcucugcuuguucgugugugugucguugcaggccuuauucaagcuuaccauggagcugcucauccugaaggccaacgccaucaccaccauccugacggcggugaccuucugcuucgccagcggccagaacaucaccgaggaguucuaccaguccacgugcagcgccgucuccaagggguaccucggcgcccugcgcaccgggugguacaccagcgugaucaccaucgagcuguccaacaucaaggagaacaagugcaacggcaccgacgccaaggugaagcucaucaagcaggagcuggacaaguacaagaacgcggucacggaccugcagaugcucaugugcagcacccccgccaccggguccggcagcgccaucgccuccggcguggcggugugcaagguccugcaccuggagggggaggugaacaagaucaagagcgcccuccuguccaccaacaaggccguggucagccuguccaacggcgugagcgugcucacguucaagguccuggaccugaagaacuacaucgacaagcagcuccugccgauccugaacaagcaguccugcagcauccccaaccccgagaccgugauggaguuccagcagaagaacaaccggcuccuggagaucacccgcgaguucuccgugaacgccggggucaccacgcccgugagcaccuacaugcugaccaacuccgagcuccugagccugaucaacgacaugccgaucaccaacgaccagaagaagcucaugagcaacaacgugcagaucguccggcagcaguccuacagcaucaugugcaucaucaaggaggaggugcuggccuacgugguccagcugccccucuacggcgugaucgacacgcccugcuggaagcugcacaccagcccccugugcaccaccaacacgaaggaggggagcaacaucugccucacccgcaccgaccggggcugguacugcgacaacgcgggcuccgugagcuucuucccgcaggccgagaccugcaaggucugcuccaaccgcguguucugcgacacgaugaacagccugacccugcccuccgaggucaaccucugcaacguggacaucuucaaccccaaguacgacugcaagaucaugaccagcaagaccgacguguccagcuccgucaucacgagccugggggccaucguguccugcuacggcaagaccaagugcaccgccagcaacaagaacaaggggaucaucaagaccuucuccaacggcugcgacuacgugagcaacaagggcgucgacacgguguccguggggaacacccuguacuacgucaacaagcaggagggccagagccucuacgugaagggggagcccaucaucaacuucuacgacccgcugguguuccccagcgacgaguucgacgccuccaucagccaggucaacgagaagaucaaccagucccuggcguucauccggaaguccgacgagcuccugcacaacgugaacgccggcaaguccaccaccaacaucaugaucaccacgaucaucaucgugaucaucgucauccugcucagccugaucgccguggggcugcugcucuacugcaaggcccgcugaggacuagucccuguucccagagcccacuuuuuuuucuuuuuuugaaauaaaauagccugucuuucagaucuaaaaaaaaaaaaaaaaaaaaaaaaaaaaaaaaaaaaaaaaaaaaaaaaaaaaaaaaaaaaaaaaaaaaaaaaaaaaaaaaaaaaaaaaaaaaaaaaaaaa

SEQ ID NO: 21615 - RNA, 1856 nt, Artificial Sequence
  mRNA product Design a-1 (A100) comprising derived and/or modified sequence from HRSV(A2)__F_DSCav1_mut7 (opt1)
aggagagucccgcagucggcguccagcggcucugcuuguucgugugugugucguugcaggccuuauucaagcuuaccauggagcugcucauccugaaggccaacgccaucaccaccauccugacggcggugaccuucugcuucgccagcggccagaacaucaccgaggaguucuaccaguccacgugcagcgccgucuccaagggguaccucagcgcccugcggaccggcugguacaccuccgugaucaccaucgagcugagcaacaucaaggagaacaagugcaacgggaccgacgccaaggugaagcucaucaagcaggagcuggacaaguacaagaacgcggucacggagcugcagaugcugaugugcuccaccccggcaaccggcuccggcuccgccaucgcgagcggcgucgccgugugcaaggugcugcaccucgagggggaggucaacaagaucaagagcgcccugcuguccaccaacaaggccguggugagccucuccaacggcgucagcgugcugaccuucaaggugcuggaccucaagaacuacaucgacaagcagcugcugcccauccugaacaagcagagcugcuccaucagcaacaucgagacggugauggaguuccagcagaagaacaaccggcuccuggagaucacccgcgaguucagcgugaacgccggggucaccacccccguguccacguacaugcugaccaacagcgagcuccugucccugaucaacgacaugccgaucaccaacgaccagaagaagcucaugagcaacaacgugcagaucguccggcagcaguccuacagcaucaugugcaucaucaaggaggaggugcuggcguacgugguccagcugccccucuacggcgugaucgacacccccugcuggaagcugcacacgagcccccugugcaccaccaacaccaaggagggguccaacaucugccucacgcgcaccgaccggggcugguacugcgacaacgccggcagcgucuccuucuucccgcaggccgagaccugcaaggugugcagcaaccgcguguucugcgacaccaugaacucccugacgcugcccagcgagguaaaccucugcaacgucgacaucuucaaccccaaguacgacugcaagaucaugaccuccaagaccgacgugagcuccagcgugaucaccucccugggggccaucgucagcugcuacggcaagacgaagugcaccgccagcaacaagaacaaggggaucaucaagaccuucuccaacggcugcgacuacgugagcaacaagggcguggacaccguguccgucgggaacacccuguacuacgugaacaagcaggagggcaagagccucuacgugaagggggagcccaucaucaacuucuacgacccgcuggucuuccccuccgacgaguucgacgcgagcaucucccaggugaacgagaagaucaaccagagccuggccuucauccgcaaguccgacgagcugcuccacaacgugaacgccggcaagagcacgaccaacaucaugaucaccaccaucaucaucgucaucaucgugauccugcugucccucaucgccguggggcugcugcucuacugcaaggcccggagcacgcccgucacccuguccaaggaccagcugagcggcaucaacaacaucgcguucuccaacugaggacuagucccuguucccagagcccacuuuuuuuucuuuuuuugaaauaaaauagccugucuuucagaucuaaaaaaaaaaaaaaaaaaaaaaaaaaaaaaaaaaaaaaaaaaaaaaaaaaaaaaaaaaaaaaaaaaaaaaaaaaaaaaaaaaaaaaaaaaaaaaaaaaaa

SEQ ID NO: 21616 - RNA, 1856 nt, Artificial Sequence
  mRNA product Design a-1 (A100) comprising derived and/or modified sequence from HRSV(A2)__F_DSCav1_mut7 (opt1)
aggagagucccgcagucggcguccagcggcucugcuuguucgugugugugucguugcaggccuuauucaagcuuaccauggagcugcucauccugaaggccaacgccaucaccaccauccugacggcggugaccuucugcuucgccagcggccagaacaucaccgaggaguucuaccaguccacgugcagcgccgucuccaagggguaccucagcgcccugcgcaccggcugguacaccuccgugaucaccaucgagcugagcaacaucaaggagaacaagugcaacgggaccgacgccaaggugaagcucaucaagcaggagcuggacaaguacaagaacgcggucacggagcugcagaugcucaugugcuccacccccgccaccggcagcggguccgccaucgccagcggcguggcggugugcaagguccugcaccuggagggcgaggugaacaagaucaaguccgcccuccugagcaccaacaaggccguggucucccugagcaacgggguguccgugcucacguucaagguccuggaccugaagaacuacaucgacaagcagcuccugccgauccugaacaagcagagcugcuccaucagcaacaucgagaccgugauggaguuccagcagaagaacaaccggcuccuggagaucacccgcgaguucuccgugaacgccggcgucaccacgcccgugagcaccuacaugcugaccaacagcgagcuccugucccugaucaacgacaugcccaucaccaacgaccagaagaagcucaugagcaacaacgugcagaucguccggcagcaguccuacagcaucaugugcaucaucaaggaggaggugcuggccuacgugguccagcugccccucuacggggugaucgacacgccgugcuggaagcugcacaccagcccccugugcaccaccaacacgaaggagggcagcaacaucugccucacccgcaccgaccgggggugguacugcgacaacgcgggcuccgugagcuucuucccccaggccgagaccugcaaggucugcuccaaccgcguguucugcgacacgaugaacagccugacccugcccuccgaggucaaccucugcaacguggacaucuucaacccgaaguacgacugcaagaucaugaccagcaagaccgacguguccagcuccgucaucacgagccugggcgccaucguguccugcuacgggaagaccaagugcaccgccagcaacaagaacaagggcaucaucaagaccuucuccaacgggugcgacuacgugagcaacaagggcgucgacacggugagcgugggcaacacccuguacuacgucaacaagcaggaggggaagucccucuacgugaagggcgagcccaucaucaacuucuacgacccccugguguuccccagcgacgaguucgacgccuccaucagccaggucaacgagaagaucaaccagucccuggcguucauccggaaguccgacgagcuccugcacaacgugaacgccgggaaguccaccaccaacaucaugaucaccacgaucaucaucgugaucaucgucauccugcucagccugaucgccgugggccugcuccuguacugcaaggcccgcuccaccccggugacccugagcaaggaccagcuguccgggaucaacaacaucgccuucagcaacugaggacuagucccuguucccagagcccacuuuuuuuucuuuuuuugaaauaaaauagccugucuuucagaucuaaaaaaaaaaaaaaaaaaaaaaaaaaaaaaaaaaaaaaaaaaaaaaaaaaaaaaaaaaaaaaaaaaaaaaaaaaaaaaaaaaaaaaaaaaaaaaaaaaaa

SEQ ID NO: 21617 - RNA, 1856 nt, Artificial Sequence
  mRNA product Design a-1 (A100) comprising derived and/or modified sequence from HRSV(A2)__F_DSCav1_mut7 (opt1)
aggagagucccgcagucggcguccagcggcucugcuuguucgugugugugucguugcaggccuuauucaagcuuaccauggagcugcucauccugaaggccaacgccaucaccaccauccugacggcggugaccuucugcuucgccagcggccagaacaucaccgaggaguucuaccaguccacgugcagcgccgucuccaagggguaccucagcgcccugcgcaccggcugguacaccuccgugaucaccaucgagcugagcaacaucaaggagaacaagugcaacgggaccgacgccaaggugaagcucaucaagcaggagcuggacaaguacaagaacgcggucacggagcugcagaugcucaugugcuccacccccgccaccggcagcggguccgccaucgccagcggcguggcggugugcaagguccugcaccuggagggcgaggugaacaagaucaaguccgcccuccugagcaccaacaaggccguggucucccugagcaacgggguguccgugcucacguucaagguccuggaccugaagaacuacaucgacaagcagcuccugccgauccugaacaagcagagcugcuccaucagcaacaucgagaccgugauggaguuccagcagaagaacaaccggcuccuggagaucacccgcgaguucuccgugaacgccggcgucaccacgcccgugagcaccuacaugcugaccaacagcgagcuccugucccugaucaacgacaugcccaucaccaacgaccagaagaagcucaugagcaacaacgugcagaucguccggcagcaguccuacagcaucaugugcaucaucaaggaggaggugcuggccuacgugguccagcugccccucuacggggugaucgacacgccgugcuggaagcugcacaccagcccccugugcaccaccaacacgaaggagggcagcaacaucugccucacccgcaccgaccgggggugguacugcgacaacgcgggcuccgugagcuucuucccccaggccgagaccugcaaggucugcuccaaccgcguguucugcgacacgaugaacagccugacccugcccuccgaggucaaccucugcaacguggacaucuucaacccgaaguacgacugcaagaucaugaccagcaagaccgacguguccagcuccgucaucacgagccugggcgccaucguguccugcuacgggaagaccaagugcaccgccagcaacaagaacaagggcaucaucaagaccuucuccaacgggugcgacuacgugagcaacaagggcgucgacacggugagcgugggcaacacccuguacuacgucaacaagcaggaggggaagucccucuacgugaagggcgagcccaucaucaacuucuacgacccccugguguuccccagcgacgaguucgacgccuccaucagccaggucaacgagaagaucaaccagucccuggcguucauccggaaguccgacgagcuccugcacaacgugaacgccgggaaguccaccaccaacaucaugaucaccacgaucaucaucgugaucaucgucauccugcucagccugaucgccgugggccugcugcucuacugcaaggcccgcuccaccccggugacccugagcaaggaccagcuguccgggaucaacaacaucgccuucagcaacugaggacuagucccuguucccagagcccacuuuuuuuucuuuuuuugaaauaaaauagccugucuuucagaucuaaaaaaaaaaaaaaaaaaaaaaaaaaaaaaaaaaaaaaaaaaaaaaaaaaaaaaaaaaaaaaaaaaaaaaaaaaaaaaaaaaaaaaaaaaaaaaaaaaaa

SEQ ID NO: 21618 - RNA, 1793 nt, Artificial Sequence
  mRNA product Design a-1 (A100) comprising derived and/or modified sequence from HRSV(A2)__F-del_DSCav1_mut7 (opt1)
aggagagucccgcagucggcguccagcggcucugcuuguucgugugugugucguugcaggccuuauucaagcuuaccauggagcugcucauccugaaggccaacgccaucaccaccauccugacggcggugaccuucugcuucgccagcggccagaacaucaccgaggaguucuaccaguccacgugcagcgccgucuccaagggguaccucagcgcccugcggaccggcugguacaccuccgugaucaccaucgagcugagcaacaucaaggagaacaagugcaacgggaccgacgccaaggugaagcucaucaagcaggagcuggacaaguacaagaacgcggucacggagcugcagaugcugaugugcuccaccccggcaaccggcuccggcuccgccaucgcgagcggcgucgccgugugcaaggugcugcaccucgagggggaggucaacaagaucaagagcgcccugcuguccaccaacaaggccguggugagccucuccaacggcgucagcgugcugaccuucaaggugcuggaccucaagaacuacaucgacaagcagcugcugcccauccugaacaagcagagcugcuccaucagcaacaucgagacggugauggaguuccagcagaagaacaaccggcuccuggagaucacccgcgaguucagcgugaacgccggggucaccacccccguguccacguacaugcugaccaacagcgagcuccugucccugaucaacgacaugccgaucaccaacgaccagaagaagcucaugagcaacaacgugcagaucguccggcagcaguccuacagcaucaugugcaucaucaaggaggaggugcuggcguacgugguccagcugccccucuacggcgugaucgacacccccugcuggaagcugcacacgagcccccugugcaccaccaacaccaaggagggguccaacaucugccucacgcgcaccgaccggggcugguacugcgacaacgccggcagcgucuccuucuucccgcaggccgagaccugcaaggugugcagcaaccgcguguucugcgacaccaugaacucccugacgcugcccagcgagguaaaccucugcaacgucgacaucuucaaccccaaguacgacugcaagaucaugaccuccaagaccgacgugagcuccagcgugaucaccucccugggggccaucgucagcugcuacggcaagacgaagugcaccgccagcaacaagaacaaggggaucaucaagaccuucuccaacggcugcgacuacgugagcaacaagggcguggacaccguguccgucgggaacacccuguacuacgugaacaagcaggagggcaagagccucuacgugaagggggagcccaucaucaacuucuacgacccgcuggucuuccccuccgacgaguucgacgcgagcaucucccaggugaacgagaagaucaaccagagccuggccuucauccgcaaguccgacgagcugcuccacaacgugaacgccggcaagagcacgaccaacaucaugaucaccaccaucaucaucgucaucaucgugauccugcugucccucaucgccguggggcugcugcucuacugcaaggcccggugaggacuagucccuguucccagagcccacuuuuuuuucuuuuuuugaaauaaaauagccugucuuucagaucuaaaaaaaaaaaaaaaaaaaaaaaaaaaaaaaaaaaaaaaaaaaaaaaaaaaaaaaaaaaaaaaaaaaaaaaaaaaaaaaaaaaaaaaaaaaaaaaaaaaa

SEQ ID NO: 21619 - RNA, 1793 nt, Artificial Sequence
  mRNA product Design a-1 (A100) comprising derived and/or modified sequence from HRSV(A2)__F-del_DSCav1_mut7 (opt1)
aggagagucccgcagucggcguccagcggcucugcuuguucgugugugugucguugcaggccuuauucaagcuuaccauggagcugcucauccugaaggccaacgccaucaccaccauccugacggcggugaccuucugcuucgccagcggccagaacaucaccgaggaguucuaccaguccacgugcagcgccgucuccaagggguaccucagcgcccugcgcaccggcugguacaccuccgugaucaccaucgagcugagcaacaucaaggagaacaagugcaacgggaccgacgccaaggugaagcucaucaagcaggagcuggacaaguacaagaacgcggucacggagcugcagaugcucaugugcuccacccccgccaccggcagcggguccgccaucgccagcggcguggcggugugcaagguccugcaccuggagggcgaggugaacaagaucaaguccgcccuccugagcaccaacaaggccguggucucccugagcaacgggguguccgugcucacguucaagguccuggaccugaagaacuacaucgacaagcagcuccugccgauccugaacaagcagagcugcuccaucagcaacaucgagaccgugauggaguuccagcagaagaacaaccggcuccuggagaucacccgcgaguucuccgugaacgccggcgucaccacgcccgugagcaccuacaugcugaccaacagcgagcuccugucccugaucaacgacaugcccaucaccaacgaccagaagaagcucaugagcaacaacgugcagaucguccggcagcaguccuacagcaucaugugcaucaucaaggaggaggugcuggccuacgugguccagcugccccucuacggggugaucgacacgccgugcuggaagcugcacaccagcccccugugcaccaccaacacgaaggagggcagcaacaucugccucacccgcaccgaccgggggugguacugcgacaacgcgggcuccgugagcuucuucccccaggccgagaccugcaaggucugcuccaaccgcguguucugcgacacgaugaacagccugacccugcccuccgaggucaaccucugcaacguggacaucuucaacccgaaguacgacugcaagaucaugaccagcaagaccgacguguccagcuccgucaucacgagccugggcgccaucguguccugcuacgggaagaccaagugcaccgccagcaacaagaacaagggcaucaucaagaccuucuccaacgggugcgacuacgugagcaacaagggcgucgacacggugagcgugggcaacacccuguacuacgucaacaagcaggaggggaagucccucuacgugaagggcgagcccaucaucaacuucuacgacccccugguguuccccagcgacgaguucgacgccuccaucagccaggucaacgagaagaucaaccagucccuggcguucauccggaaguccgacgagcuccugcacaacgugaacgccgggaaguccaccaccaacaucaugaucaccacgaucaucaucgugaucaucgucauccugcucagccugaucgccgugggccugcuccuguacugcaaggcccgcugaggacuagucccuguucccagagcccacuuuuuuuucuuuuuuugaaauaaaauagccugucuuucagaucuaaaaaaaaaaaaaaaaaaaaaaaaaaaaaaaaaaaaaaaaaaaaaaaaaaaaaaaaaaaaaaaaaaaaaaaaaaaaaaaaaaaaaaaaaaaaaaaaaaaa

SEQ ID NO: 21620 - RNA, 1793 nt, Artificial Sequence
  mRNA product Design a-1 (A100) comprising derived and/or modified sequence from HRSV(A2)__F-del_DSCav1_mut7 (opt1)
aggagagucccgcagucggcguccagcggcucugcuuguucgugugugugucguugcaggccuuauucaagcuuaccauggagcugcucauccugaaggccaacgccaucaccaccauccugacggcggugaccuucugcuucgccagcggccagaacaucaccgaggaguucuaccaguccacgugcagcgccgucuccaagggguaccucagcgcccugcgcaccggcugguacaccuccgugaucaccaucgagcugagcaacaucaaggagaacaagugcaacgggaccgacgccaaggugaagcucaucaagcaggagcuggacaaguacaagaacgcggucacggagcugcagaugcucaugugcuccacccccgccaccggcagcggguccgccaucgccagcggcguggcggugugcaagguccugcaccuggagggcgaggugaacaagaucaaguccgcccuccugagcaccaacaaggccguggucucccugagcaacgggguguccgugcucacguucaagguccuggaccugaagaacuacaucgacaagcagcuccugccgauccugaacaagcagagcugcuccaucagcaacaucgagaccgugauggaguuccagcagaagaacaaccggcuccuggagaucacccgcgaguucuccgugaacgccggcgucaccacgcccgugagcaccuacaugcugaccaacagcgagcuccugucccugaucaacgacaugcccaucaccaacgaccagaagaagcucaugagcaacaacgugcagaucguccggcagcaguccuacagcaucaugugcaucaucaaggaggaggugcuggccuacgugguccagcugccccucuacggggugaucgacacgccgugcuggaagcugcacaccagcccccugugcaccaccaacacgaaggagggcagcaacaucugccucacccgcaccgaccgggggugguacugcgacaacgcgggcuccgugagcuucuucccccaggccgagaccugcaaggucugcuccaaccgcguguucugcgacacgaugaacagccugacccugcccuccgaggucaaccucugcaacguggacaucuucaacccgaaguacgacugcaagaucaugaccagcaagaccgacguguccagcuccgucaucacgagccugggcgccaucguguccugcuacgggaagaccaagugcaccgccagcaacaagaacaagggcaucaucaagaccuucuccaacgggugcgacuacgugagcaacaagggcgucgacacggugagcgugggcaacacccuguacuacgucaacaagcaggaggggaagucccucuacgugaagggcgagcccaucaucaacuucuacgacccccugguguuccccagcgacgaguucgacgccuccaucagccaggucaacgagaagaucaaccagucccuggcguucauccggaaguccgacgagcuccugcacaacgugaacgccgggaaguccaccaccaacaucaugaucaccacgaucaucaucgugaucaucgucauccugcucagccugaucgccgugggccugcugcucuacugcaaggcccgcugaggacuagucccuguucccagagcccacuuuuuuuucuuuuuuugaaauaaaauagccugucuuucagaucuaaaaaaaaaaaaaaaaaaaaaaaaaaaaaaaaaaaaaaaaaaaaaaaaaaaaaaaaaaaaaaaaaaaaaaaaaaaaaaaaaaaaaaaaaaaaaaaaaaaa

SEQ ID NO: 21621 - RNA, 1859 nt, Artificial Sequence
  mRNA product Design a-1 (A100) comprising derived and/or modified sequence from HRSV(A2)__F_DSCav1_mut8 (opt1)
aggagagucccgcagucggcguccagcggcucugcuuguucgugugugugucguugcaggccuuauucaagcuuaccauggagcugcucauccugaaggccaacgccaucaccaccauccugacggcggugaccuucugcuucgccagcggccagaacaucaccgaggaguucuaccaguccacgugcagcgccgucuccaagggguaccucggcgcccugcggaccggcugguacaccuccgugaucaccaucgagcugagcaacaucaaggagaucaagugcaacgggaccgacgccaaggugaagcucaucaagcaggagcuggacaaguacaagaacgcggucacggaccugcagcuccugaugcaguccaccccggcaaccggcuccggcuccgccaucgcgagcggcgucgccgugugcaaggugcugcaccucgagggggaggucaacaagaucaagagcgcccugcuguccaccaacaaggccguggugagccucuccggcugcggcgucagcgugcugaccuucaaggugcuggaccucaagaacuacaucgacaagcagcugcugcccauccugaacaagcagagcugcuccauccccaacaucgagacggugaucgaguuccagcagaagaacaaccggcuccuggagaucacccgcgaguucagcgugaacgccggggucaccacccccguguccacguacaugcugaccaacagcgagcuccugucccugaucaacgacaugccgaucaccaacgaccagaagaagcucaugagcaacaacgugcagaucguccggcagcaguccuacagcaucaugugcaucaucaaggaggaggugcuggcguacgugguccagcugccccucuacggcgugaucgacacccccugcuggaagcugcacacgagcccccugugcaccaccaacaccaaggagggguccaacaucugccucacgcgcaccgaccggggcugguacugcgacaacgccggcagcgucuccuucuucccgcaggccgagaccugcaaggugcagagcaaccgcguguucugcgacaccaugaacucccugacgcugcccagcgagguaaaccucugcaacgucgacaucuucaaccccaaguacgacugcaagaucaugaccuccaagaccgacgugagcuccagcgugaucaccucccugggggccaucgucagcugcuacggcaagacgaagugcaccgccagcaacaagugccgggggaucaucaagaccuucuccaacggcugcgacuacgugagcaacaagggcguggacaccguguccgucgggaacacccuguacuacgugaacaagcaggagggccagagccucuacgugaagggggagcccaucaucaacuucuacgacccgcuggucuuccccuccgacgaguucgacgcgagcaucucccaggugaacgagaagaucaaccagagccuggccuucauccgcaaguccgacgagcugcuccacaacgugaacgccggcaagagcacgaccaacaucaugaucaccaccaucaucaucgucaucaucgugauccugcugucccucaucgccguggggcugcugcucuacugcaaggcccggagcacgcccgucacccuguccaaggaccagcugagcggcaucaacaacaucgcguucuccaacugaggacuagucccuguucccagagcccacuuuuuuuucuuuuuuugaaauaaaauagccugucuuucagaucuaaaaaaaaaaaaaaaaaaaaaaaaaaaaaaaaaaaaaaaaaaaaaaaaaaaaaaaaaaaaaaaaaaaaaaaaaaaaaaaaaaaaaaaaaaaaaaaaaaaa

SEQ ID NO: 21622 - RNA, 1859 nt, Artificial Sequence
  mRNA product Design a-1 (A100) comprising derived and/or modified sequence from HRSV(A2)__F_DSCav1_mut8 (opt1)
aggagagucccgcagucggcguccagcggcucugcuuguucgugugugugucguugcaggccuuauucaagcuuaccauggagcugcucauccugaaggccaacgccaucaccaccauccugacggcggugaccuucugcuucgccagcggccagaacaucaccgaggaguucuaccaguccacgugcagcgccgucuccaagggguaccucggcgcccugcgcaccgggugguacaccagcgugaucaccaucgagcuguccaacaucaaggagaucaagugcaacggcaccgacgccaaggugaagcucaucaagcaggagcuggacaaguacaagaacgcggucacggaccugcagcuccugaugcagagcacccccgccaccggguccggcagcgccaucgccuccggcguggcggugugcaagguccugcaccucgagggggaggugaacaagaucaagagcgcccugcuguccaccaacaaggccguggucagccucuccggcugcggggugagcgugcugacguucaagguccuggaccucaagaacuacaucgacaagcagcugcugccgauccucaacaagcaguccugcagcauccccaacaucgagaccgugaucgaguuccagcagaagaacaaccggcugcuggagaucacccgcgaguucuccgugaacgccggcgucaccacgcccgugagcaccuacaugcucaccaacuccgagcugcugagccucaucaacgacaugcccaucaccaacgaccagaagaagcugaugagcaacaacgugcagaucguccggcagcaguccuacagcaucaugugcaucaucaaggaggaggugcuggccuacgugguccagcucccgcuguacggggugaucgacacgcccugcuggaagcugcacaccagcccccucugcaccaccaacacgaaggagggcuccaacaucugccugacccgcaccgaccggggcugguacugcgacaacgcgggguccgugagcuucuucccccaggccgagaccugcaagguccaguccaaccgcguguucugcgacacgaugaacagccugacccucccguccgaggucaaccugugcaacguggacaucuucaaccccaaguacgacugcaagaucaugaccagcaagaccgacguguccagcuccgucaucacgagccugggcgccaucguguccugcuacgggaagaccaagugcaccgccagcaacaagugccggggcaucaucaagaccuucuccaacggcugcgacuacgugagcaacaagggggucgacacgguguccgugggcaacacccucuacuacgucaacaagcaggaggggcagagccuguacgugaagggcgagcccaucaucaacuucuacgacccccugguguucccgagcgacgaguucgacgccuccaucagccaggucaacgagaagaucaaccagucccucgcguucauccgcaagagcgacgagcugcugcacaacgugaacgccgggaaguccaccaccaacaucaugaucaccacgaucaucaucgugaucaucgucauccuccugagccugaucgccgugggccuccugcuguacugcaaggcccgguccacccccgugacccugagcaaggaccagcucuccggcaucaacaacaucgccuucagcaacugaggacuagucccuguucccagagcccacuuuuuuuucuuuuuuugaaauaaaauagccugucuuucagaucuaaaaaaaaaaaaaaaaaaaaaaaaaaaaaaaaaaaaaaaaaaaaaaaaaaaaaaaaaaaaaaaaaaaaaaaaaaaaaaaaaaaaaaaaaaaaaaaaaaaa

SEQ ID NO: 21623 - RNA, 1859 nt, Artificial Sequence
  mRNA product Design a-1 (A100) comprising derived and/or modified sequence from HRSV(A2)__F_DSCav1_mut8 (opt1)
aggagagucccgcagucggcguccagcggcucugcuuguucgugugugugucguugcaggccuuauucaagcuuaccauggagcugcucauccugaaggccaacgccaucaccaccauccugacggcggugaccuucugcuucgccagcggccagaacaucaccgaggaguucuaccaguccacgugcagcgccgucuccaagggguaccucggcgcccugcgcaccgggugguacaccagcgugaucaccaucgagcuguccaacaucaaggagaucaagugcaacggcaccgacgccaaggugaagcucaucaagcaggagcuggacaaguacaagaacgcggucacggaccugcagcuccugaugcagagcacccccgccaccggguccggcagcgccaucgccuccggcguggcggugugcaagguccugcaccucgagggggaggugaacaagaucaagagcgcccugcuguccaccaacaaggccguggucagccucuccggcugcggggugagcgugcugacguucaagguccuggaccucaagaacuacaucgacaagcagcugcugccgauccucaacaagcaguccugcagcauccccaacaucgagaccgugaucgaguuccagcagaagaacaaccggcugcuggagaucacccgcgaguucuccgugaacgccggcgucaccacgcccgugagcaccuacaugcucaccaacuccgagcugcugagccucaucaacgacaugcccaucaccaacgaccagaagaagcugaugagcaacaacgugcagaucguccggcagcaguccuacagcaucaugugcaucaucaaggaggaggugcuggccuacgugguccagcucccgcuguacggggugaucgacacgcccugcuggaagcugcacaccagcccccucugcaccaccaacacgaaggagggcuccaacaucugccugacccgcaccgaccggggcugguacugcgacaacgcgggguccgugagcuucuucccccaggccgagaccugcaagguccaguccaaccgcguguucugcgacacgaugaacagccugacccucccguccgaggucaaccugugcaacguggacaucuucaaccccaaguacgacugcaagaucaugaccagcaagaccgacguguccagcuccgucaucacgagccugggcgccaucguguccugcuacgggaagaccaagugcaccgccagcaacaagugccggggcaucaucaagaccuucuccaacggcugcgacuacgugagcaacaagggggucgacacgguguccgugggcaacacccucuacuacgucaacaagcaggaggggcagagccuguacgugaagggcgagcccaucaucaacuucuacgacccccugguguucccgagcgacgaguucgacgccuccaucagccaggucaacgagaagaucaaccagucccucgcguucauccgcaagagcgacgagcugcugcacaacgugaacgccgggaaguccaccaccaacaucaugaucaccacgaucaucaucgugaucaucgucauccuccugagccugaucgccgugggccugcuccuguacugcaaggcccgguccacccccgugacccugagcaaggaccagcucuccggcaucaacaacaucgccuucagcaacugaggacuagucccuguucccagagcccacuuuuuuuucuuuuuuugaaauaaaauagccugucuuucagaucuaaaaaaaaaaaaaaaaaaaaaaaaaaaaaaaaaaaaaaaaaaaaaaaaaaaaaaaaaaaaaaaaaaaaaaaaaaaaaaaaaaaaaaaaaaaaaaaaaaaa

SEQ ID NO: 21624 - RNA, 1796 nt, Artificial Sequence
  mRNA product Design a-1 (A100) comprising derived and/or modified sequence from HRSV(A2)__F-del_DSCav1_mut8 (opt1)
aggagagucccgcagucggcguccagcggcucugcuuguucgugugugugucguugcaggccuuauucaagcuuaccauggagcugcucauccugaaggccaacgccaucaccaccauccugacggcggugaccuucugcuucgccagcggccagaacaucaccgaggaguucuaccaguccacgugcagcgccgucuccaagggguaccucggcgcccugcggaccggcugguacaccuccgugaucaccaucgagcugagcaacaucaaggagaucaagugcaacgggaccgacgccaaggugaagcucaucaagcaggagcuggacaaguacaagaacgcggucacggaccugcagcuccugaugcaguccaccccggcaaccggcuccggcuccgccaucgcgagcggcgucgccgugugcaaggugcugcaccucgagggggaggucaacaagaucaagagcgcccugcuguccaccaacaaggccguggugagccucuccggcugcggcgucagcgugcugaccuucaaggugcuggaccucaagaacuacaucgacaagcagcugcugcccauccugaacaagcagagcugcuccauccccaacaucgagacggugaucgaguuccagcagaagaacaaccggcuccuggagaucacccgcgaguucagcgugaacgccggggucaccacccccguguccacguacaugcugaccaacagcgagcuccugucccugaucaacgacaugccgaucaccaacgaccagaagaagcucaugagcaacaacgugcagaucguccggcagcaguccuacagcaucaugugcaucaucaaggaggaggugcuggcguacgugguccagcugccccucuacggcgugaucgacacccccugcuggaagcugcacacgagcccccugugcaccaccaacaccaaggagggguccaacaucugccucacgcgcaccgaccggggcugguacugcgacaacgccggcagcgucuccuucuucccgcaggccgagaccugcaaggugcagagcaaccgcguguucugcgacaccaugaacucccugacgcugcccagcgagguaaaccucugcaacgucgacaucuucaaccccaaguacgacugcaagaucaugaccuccaagaccgacgugagcuccagcgugaucaccucccugggggccaucgucagcugcuacggcaagacgaagugcaccgccagcaacaagugccgggggaucaucaagaccuucuccaacggcugcgacuacgugagcaacaagggcguggacaccguguccgucgggaacacccuguacuacgugaacaagcaggagggccagagccucuacgugaagggggagcccaucaucaacuucuacgacccgcuggucuuccccuccgacgaguucgacgcgagcaucucccaggugaacgagaagaucaaccagagccuggccuucauccgcaaguccgacgagcugcuccacaacgugaacgccggcaagagcacgaccaacaucaugaucaccaccaucaucaucgucaucaucgugauccugcugucccucaucgccguggggcugcugcucuacugcaaggcccggugaggacuagucccuguucccagagcccacuuuuuuuucuuuuuuugaaauaaaauagccugucuuucagaucuaaaaaaaaaaaaaaaaaaaaaaaaaaaaaaaaaaaaaaaaaaaaaaaaaaaaaaaaaaaaaaaaaaaaaaaaaaaaaaaaaaaaaaaaaaaaaaaaaaaa

SEQ ID NO: 21625 - RNA, 1796 nt, Artificial Sequence
  mRNA product Design a-1 (A100) comprising derived and/or modified sequence from HRSV(A2)__F-del_DSCav1_mut8 (opt1)
aggagagucccgcagucggcguccagcggcucugcuuguucgugugugugucguugcaggccuuauucaagcuuaccauggagcugcucauccugaaggccaacgccaucaccaccauccugacggcggugaccuucugcuucgccagcggccagaacaucaccgaggaguucuaccaguccacgugcagcgccgucuccaagggguaccucggcgcccugcgcaccgggugguacaccagcgugaucaccaucgagcuguccaacaucaaggagaucaagugcaacggcaccgacgccaaggugaagcucaucaagcaggagcuggacaaguacaagaacgcggucacggaccugcagcuccugaugcagagcacccccgccaccggguccggcagcgccaucgccuccggcguggcggugugcaagguccugcaccucgagggggaggugaacaagaucaagagcgcccugcuguccaccaacaaggccguggucagccucuccggcugcggggugagcgugcugacguucaagguccuggaccucaagaacuacaucgacaagcagcugcugccgauccucaacaagcaguccugcagcauccccaacaucgagaccgugaucgaguuccagcagaagaacaaccggcugcuggagaucacccgcgaguucuccgugaacgccggcgucaccacgcccgugagcaccuacaugcucaccaacuccgagcugcugagccucaucaacgacaugcccaucaccaacgaccagaagaagcugaugagcaacaacgugcagaucguccggcagcaguccuacagcaucaugugcaucaucaaggaggaggugcuggccuacgugguccagcucccgcuguacggggugaucgacacgcccugcuggaagcugcacaccagcccccucugcaccaccaacacgaaggagggcuccaacaucugccugacccgcaccgaccggggcugguacugcgacaacgcgggguccgugagcuucuucccccaggccgagaccugcaagguccaguccaaccgcguguucugcgacacgaugaacagccugacccucccguccgaggucaaccugugcaacguggacaucuucaaccccaaguacgacugcaagaucaugaccagcaagaccgacguguccagcuccgucaucacgagccugggcgccaucguguccugcuacgggaagaccaagugcaccgccagcaacaagugccggggcaucaucaagaccuucuccaacggcugcgacuacgugagcaacaagggggucgacacgguguccgugggcaacacccucuacuacgucaacaagcaggaggggcagagccuguacgugaagggcgagcccaucaucaacuucuacgacccccugguguucccgagcgacgaguucgacgccuccaucagccaggucaacgagaagaucaaccagucccucgcguucauccgcaagagcgacgagcugcugcacaacgugaacgccgggaaguccaccaccaacaucaugaucaccacgaucaucaucgugaucaucgucauccuccugagccugaucgccgugggccuccugcuguacugcaaggcccggugaggacuagucccuguucccagagcccacuuuuuuuucuuuuuuugaaauaaaauagccugucuuucagaucuaaaaaaaaaaaaaaaaaaaaaaaaaaaaaaaaaaaaaaaaaaaaaaaaaaaaaaaaaaaaaaaaaaaaaaaaaaaaaaaaaaaaaaaaaaaaaaaaaaaa

SEQ ID NO: 21626 - RNA, 1796 nt, Artificial Sequence
  mRNA product Design a-1 (A100) comprising derived and/or modified sequence from HRSV(A2)__F-del_DSCav1_mut8 (opt1)
aggagagucccgcagucggcguccagcggcucugcuuguucgugugugugucguugcaggccuuauucaagcuuaccauggagcugcucauccugaaggccaacgccaucaccaccauccugacggcggugaccuucugcuucgccagcggccagaacaucaccgaggaguucuaccaguccacgugcagcgccgucuccaagggguaccucggcgcccugcgcaccgggugguacaccagcgugaucaccaucgagcuguccaacaucaaggagaucaagugcaacggcaccgacgccaaggugaagcucaucaagcaggagcuggacaaguacaagaacgcggucacggaccugcagcuccugaugcagagcacccccgccaccggguccggcagcgccaucgccuccggcguggcggugugcaagguccugcaccucgagggggaggugaacaagaucaagagcgcccugcuguccaccaacaaggccguggucagccucuccggcugcggggugagcgugcugacguucaagguccuggaccucaagaacuacaucgacaagcagcugcugccgauccucaacaagcaguccugcagcauccccaacaucgagaccgugaucgaguuccagcagaagaacaaccggcugcuggagaucacccgcgaguucuccgugaacgccggcgucaccacgcccgugagcaccuacaugcucaccaacuccgagcugcugagccucaucaacgacaugcccaucaccaacgaccagaagaagcugaugagcaacaacgugcagaucguccggcagcaguccuacagcaucaugugcaucaucaaggaggaggugcuggccuacgugguccagcucccgcuguacggggugaucgacacgcccugcuggaagcugcacaccagcccccucugcaccaccaacacgaaggagggcuccaacaucugccugacccgcaccgaccggggcugguacugcgacaacgcgggguccgugagcuucuucccccaggccgagaccugcaagguccaguccaaccgcguguucugcgacacgaugaacagccugacccucccguccgaggucaaccugugcaacguggacaucuucaaccccaaguacgacugcaagaucaugaccagcaagaccgacguguccagcuccgucaucacgagccugggcgccaucguguccugcuacgggaagaccaagugcaccgccagcaacaagugccggggcaucaucaagaccuucuccaacggcugcgacuacgugagcaacaagggggucgacacgguguccgugggcaacacccucuacuacgucaacaagcaggaggggcagagccuguacgugaagggcgagcccaucaucaacuucuacgacccccugguguucccgagcgacgaguucgacgccuccaucagccaggucaacgagaagaucaaccagucccucgcguucauccgcaagagcgacgagcugcugcacaacgugaacgccgggaaguccaccaccaacaucaugaucaccacgaucaucaucgugaucaucgucauccuccugagccugaucgccgugggccugcuccuguacugcaaggcccggugaggacuagucccuguucccagagcccacuuuuuuuucuuuuuuugaaauaaaauagccugucuuucagaucuaaaaaaaaaaaaaaaaaaaaaaaaaaaaaaaaaaaaaaaaaaaaaaaaaaaaaaaaaaaaaaaaaaaaaaaaaaaaaaaaaaaaaaaaaaaaaaaaaaaa

SEQ ID NO: 21627 - RNA, 1019 nt, Artificial Sequence
  mRNA product Design a-1 (A100) comprising derived and/or modified sequence from HRSV(A2)__P0DOE7.1__M (opt1)
aggagagucccgcagucggcguccagcggcucugcuuguucgugugugugucguugcaggccuuauucaagcuuaccauggagaccuacgugaacaagcugcacgagggcagcaccuacacggccgccguccaguacaacgugcucgagaaggacgacgaccccgcgucccugaccaucugggugccgauguuccagagcuccaugcccgccgaccugcucaucaaggagcuggccaacgucaacauccuggugaagcagaucagcacccccaaggggcccucccuccgcgugaugaucaacagccgguccgccguccuggcccagaugccgagcaaguucaccaucugcgcgaacgugucccuggacgagcgcagcaagcucgccuacgacgugacgacccccugcgagaucaaggccugcucccugaccugccucaagagcaagaacaugcugaccacggucaaggaccugaccaugaagacccugaaccccacccacgacaucaucgcccucugcgaguucgagaacaucgugacguccaagaaggugaucauccccaccuaccugcggagcaucuccguccgcaacaaggaccugaacacccucgagaacaucaccacgaccgaguucaagaacgcgaucaccaacgccaagaucaucccguacagcggccugcugcucgugaucaccgugacggacaacaagggggccuucaaguacaucaagccccagucccaguucaucgucgaccugggcgccuaccuggagaaggagagcaucuacuacgugaccaccaacuggaagcacaccgccacgcgguucgcgaucaagcccauggaggacugaggacuagucccuguucccagagcccacuuuuuuuucuuuuuuugaaauaaaauagccugucuuucagaucuaaaaaaaaaaaaaaaaaaaaaaaaaaaaaaaaaaaaaaaaaaaaaaaaaaaaaaaaaaaaaaaaaaaaaaaaaaaaaaaaaaaaaaaaaaaaaaaaaaaa

SEQ ID NO: 21628 - RNA, 1019 nt, Artificial Sequence; identical to SEQ ID NO: 21627
  mRNA product Design a-1 (A100) comprising derived and/or modified sequence from HRSV(A2)__P0DOE7.1__M (opt1)

SEQ ID NO: 21629 - RNA, 1424 nt, Artificial Sequence
  mRNA product Design a-1 (A100) comprising derived and/or modified sequence from HRSV(A2)__P03418.1__N (opt1)
aggagagucccgcagucggcguccagcggcucugcuuguucgugugugugucguugcaggccuuauucaagcuuaccauggcccugagcaaggugaagcucaacgacacccugaacaaggaccagcugcucuccagcuccaaguacaccauccagcgcagcaccggcgacuccaucgacacccccaacuacgacguccagaagcacaucaacaagcugugcgggaugcugcucaucaccgaggacgccaaccacaaguucaccggccugaucgggaugcuguacgcgaugagccggcucggccgcgaggacacgaucaagauccugcgggacgccggguaccacgugaaggccaacggcguggacgucaccacccaccgccaggacaucaacggcaaggagaugaaguucgaggugcugacccucgccucccugacgaccgagauccagaucaacaucgagaucgagagccggaaguccuacaagaagaugcugaaggagaugggggagguggccccggaguaccgccacgacagccccgacugcggcaugaucauccucugcaucgcggcccuggucaucaccaagcuggccgccggggaccgguccggccucaccgcggugauccgccgggccaacaacgugcugaagaacgagaugaagcgcuacaaggggcugcuccccaaggacaucgccaacagcuucuacgaggucuucgagaagcacccccacuucaucgacguguucgugcacuucggcaucgcccaguccagcacgcggggcgggucccgcgucgagggcaucuucgccgggcuguucaugaacgcguacggcgccggccaggugaugcugcgguggggcgugcucgccaagagcgucaagaacaucaugcuggggcacgccuccgugcaggccgagauggagcaggucguggagguguacgaguacgcgcagaagcucgggggcgaggccggguucuaccacauccugaacaacccgaaggccagccugcugucccucacccaguucccccacuucagcagcgugguccugggcaacgccgccggccuggggaucaugggcgaguaccgcgggacgccccggaaccaggaccucuacgacgcggccaaggccuacgccgagcagcugaaggagaacggcgugaucaacuacuccgugcuggaccucaccgccgaggagcuggaggcgaucaagcaccagcugaaccccaaggacaacgacgucgagcucugaggacuagucccuguucccagagcccacuuuuuuuucuuuuuuugaaauaaaauagccugucuuucagaucuaaaaaaaaaaaaaaaaaaaaaaaaaaaaaaaaaaaaaaaaaaaaaaaaaaaaaaaaaaaaaaaaaaaaaaaaaaaaaaaaaaaaaaaaaaaaaaaaaaaa

SEQ ID NO: 21630 - RNA, 1424 nt, Artificial Sequence; identical to SEQ ID NO: 21629
  mRNA product Design a-1 (A100) comprising derived and/or modified sequence from HRSV(A2)__P03418.1__N (opt1)

SEQ ID NO: 21631 - RNA, 974 nt, Artificial Sequence
  mRNA product Design a-1 (A100) comprising derived and/or modified sequence from HRSV(A2)__P03421.1__P (opt1)
aggagagucccgcagucggcguccagcggcucugcuuguucgugugugugucguugcaggccuuauucaagcuuaccauggagaaguucgcccccgaguuccacggcgaggacgccaacaaccgcgcgaccaaguuccuggagagcaucaaggggaaguucaccuccccgaaggaccccaagaagaaggacagcaucaucuccgugaacagcaucgacaucgaggucacgaaggagucccccaucaccagcaacuccaccaucaucaaccccaccaacgagacggacgacaccgccggcaacaagccgaacuaccagcggaagccccucgugagcuucaaggaggaccccacccccuccgacaacccguucagcaagcuguacaaggagaccaucgagacguucgacaacaacgaggaggaguccagcuacuccuacgaggagaucaacgaccagaccaacgacaacaucaccgcccgccuggaccggaucgacgagaagcucagcgagauccuggggaugcugcacacccucguggucgccuccgccggccccacgagcgcgcgcgacgggauccgggacgccaugaucggccugcgcgaggagaugaucgagaagauccggaccgaggcccugaugaccaacgaccgccucgaggccauggcgcggcugcgcaacgaggaguccgagaagauggccaaggacaccagcgacgaggugucccugaaccccacgagcgagaagcucaacaaccugcuggagggcaacgacagcgacaacgaccucucccuggaggacuucugaggacuagucccuguucccagagcccacuuuuuuuucuuuuuuugaaauaaaauagccugucuuucagaucuaaaaaaaaaaaaaaaaaaaaaaaaaaaaaaaaaaaaaaaaaaaaaaaaaaaaaaaaaaaaaaaaaaaaaaaaaaaaaaaaaaaaaaaaaaaaaaaaaaaa

SEQ ID NO: 21632 - RNA, 974 nt, Artificial Sequence; identical to SEQ ID NO: 21631
  mRNA product Design a-1 (A100) comprising derived and/or modified sequence from HRSV(A2)__P03421.1__P (opt1)

SEQ ID NO: 21633 - RNA, 833 nt, Artificial Sequence
  mRNA product Design a-1 (A100) comprising derived and/or modified sequence from HRSV(A2)__P04545.1__M2-1 (opt1)
aggagagucccgcagucggcguccagcggcucugcuuguucgugugugugucguugcaggccuuauucaagcuuaccaugagccgccggaaccccugcaaguucgagauccgcggccacugccugaacgggaagcggugccacuucucccacaacuacuucgaguggccgccccacgcccuccuggugcgccagaacuucaugcugaaccggauccucaagagcauggacaaguccaucgacacccugagcgagaucuccggcgccgcggagcuggaccgcaccgaggaguacgcccucggggucgugggcgugcuggagagcuacaucggguccaucaacaacaucacgaagcagagcgccugcgucgccauguccaagcugcucaccgagcugaacagcgacgacaucaagaagcugcgggacaacgaggagcucaacucccccaagauccgcguguacaacaccgugaucagcuacaucgaguccaaccggaagaacaacaagcagaccauccaccuccugaagcgccugcccgccgacguccugaagaagacgaucaagaacacccuggacauccacaagagcaucaccaucaacaacccgaaggaguccaccgugagcgacacgaacgaccacgcgaagaacaacgacaccaccugaggacuagucccuguucccagagcccacuuuuuuuucuuuuuuugaaauaaaauagccugucuuucagaucuaaaaaaaaaaaaaaaaaaaaaaaaaaaaaaaaaaaaaaaaaaaaaaaaaaaaaaaaaaaaaaaaaaaaaaaaaaaaaaaaaaaaaaaaaaaaaaaaaaaa

SEQ ID NO: 21634 - RNA, 833 nt, Artificial Sequence; identical to SEQ ID NO: 21633
  mRNA product Design a-1 (A100) comprising derived and/or modified sequence from HRSV(A2)__P04545.1__M2-1 (opt1)

SEQ ID NO: 21635 - RNA, 1973 nt, Artificial Sequence
  mRNA product Design a-1 (A100) comprising derived and/or modified sequence from HRSV(Memphis-37)__AIY60640.1__F0 (opt1)
aggagagucccgcagucggcguccagcggcucugcuuguucgugugugugucguugcaggccuuauucaagcuuaccauggagcugcccauccucaagaccaacgccaucaccacgauccuggccgcggugacccugugcuucgccagcucccagaacaucaccgaggaguucuaccagagcacgugcuccgccgucagcaagggcuaccucuccgcccugcgcaccgggugguacaccagcgugaucaccaucgagcuguccaacaucaaggagaacaagugcaacggcaccgacgccaaggugaagcucaucaagcaggagcuggacaaguacaagaacgcggucacggagcugcagcuccugaugcagagcaccccggccgccaacaaccgggcccgccgggagcugccccgcuucaugaacuacacccucaacaacaccaagaacaacaacgugacgcuguccaagaagcggaagcgccgguuccugggguuccuccugggcguggggagcgcgaucgccuccggcaucgccgucagcaaggugcugcaccucgagggcgaggugaacaagaucaagaacgcccugcuguccaccaacaaggccgucgugagccucuccaacggggugagcguccugaccuccaaggugcuggaccucaagaacuacaucgacaagcagcugcugcccaucgugaacaagcagagcugcuccaucagcaacaucgagaccgucaucgaguuccagcagaagaacaaccgccuccuggagaucacgcgggaguucagcgugaacgcgggcgugaccacccccgucuccaccuacaugcugacgaacagcgagcuccugucccugaucaacgacaugccgaucaccaacgaccagaagaagcucaugagcaacaacgugcagaucgugcgccagcaguccuacagcaucauguccaucaucaaggaggagguccuggccuacguggugcagcugccccucuacggggucaucgacacccccugcuggaagcugcacaccagcccccugugcacgaccaacaccaaggagggcuccaacaucugccucacccggacggaccgcgggugguacugcgacaacgccggcagcguguccuucuucccgcaggccgagaccugcaagguccagagcaaccggguguucugcgacaccaugaacucccugacccugcccagcgaggugaaccucugcaacaucgacaucuucaaccccaaguacgacugcaagaucaugacguccaagaccgacgucagcuccagcgugaucaccucccugggcgccaucgugagcugcuacgggaagaccaagugcacggcgagcaacaagaaccgcggcaucaucaagaccuucuccaacgggugcgacuacgucagcaacaagggcguggacaccguguccgucggcaacacccuguacuacgugaacaagcaggagggcaagagccucuacgugaagggggagcccaucaucaacuucuacgacccgcuggucuuccccuccgacgaguucgacgccagcaucucccaggugaacgagaagaucaaccagagccuggccuucauccggaaguccgacgagcuccugcacaacgugaacgucggcaagagcaccacgaacaucaugaucaccaccaucaucaucgugaucaucgugauccugcugcuccugaucgccgucgggcuguuccucuacugcaaggcccgcuccacccccgugacgcugagcaaggaccagcuguccgggaucaacaacaucgcguucagcaacugaggacuagucccuguucccagagcccacuuuuuuuucuuuuuuugaaauaaaauagccugucuuucagaucuaaaaaaaaaaaaaaaaaaaaaaaaaaaaaaaaaaaaaaaaaaaaaaaaaaaaaaaaaaaaaaaaaaaaaaaaaaaaaaaaaaaaaaaaaaaaaaaaaaaa

SEQ ID NO: 21636 - RNA, 1973 nt, Artificial Sequence
  mRNA product Design a-1 (A100) comprising derived and/or modified sequence from HRSV(Memphis-37)__AIY60640.1__F0 (opt1)
aggagagucccgcagucggcguccagcggcucugcuuguucgugugugugucguugcaggccuuauucaagcuuaccauggagcugcccauccucaagaccaacgccaucaccacgauccuggccgcggugacccugugcuucgccagcucccagaacaucaccgaggaguucuaccagagcacgugcuccgccgucagcaagggcuaccucuccgcccugcgcaccgggugguacaccagcgugaucaccaucgagcuguccaacaucaaggagaacaagugcaacggcaccgacgccaaggugaagcucaucaagcaggagcuggacaaguacaagaacgcggucacggagcugcagcuccugaugcagagcaccccggccgccaacaaccgggcccgccgggagcugccccgcuucaugaacuacacccucaacaacaccaagaacaacaacgugacgcuguccaagaagcggaagcgccgguuccugggguuccuccugggcguggggagcgcgaucgccuccggcaucgccgucagcaaggugcugcaccucgagggcgaggugaacaagaucaagaacgcccugcuguccaccaacaaggccgucgugagccucuccaacggggugagcguccugaccuccaaggugcuggaccucaagaacuacaucgacaagcagcugcugcccaucgugaacaagcagagcugcuccaucagcaacaucgagaccgucaucgaguuccagcagaagaacaaccgccuccuggagaucacgcgggaguucagcgugaacgcgggcgugaccacccccgucuccaccuacaugcugacgaacagcgagcuccugucccugaucaacgacaugccgaucaccaacgaccagaagaagcucaugagcaacaacgugcagaucgugcgccagcaguccuacagcaucauguccaucaucaaggaggagguccuggccuacguggugcagcugccccucuacggggucaucgacacccccugcuggaagcugcacaccagcccccugugcacgaccaacaccaaggagggcuccaacaucugccucacccggacggaccgcgggugguacugcgacaacgccggcagcguguccuucuucccgcaggccgagaccugcaagguccagagcaaccggguguucugcgacaccaugaacucccugacccugcccagcgaggugaaccucugcaacaucgacaucuucaaccccaaguacgacugcaagaucaugacguccaagaccgacgucagcuccagcgugaucaccucccugggcgccaucgugagcugcuacgggaagaccaagugcacggcgagcaacaagaaccgcggcaucaucaagaccuucuccaacgggugcgacuacgucagcaacaagggcguggacaccguguccgucggcaacacccuguacuacgugaacaagcaggagggcaagagccucuacgugaagggggagcccaucaucaacuucuacgacccgcuggucuuccccuccgacgaguucgacgccagcaucucccaggugaacgagaagaucaaccagagccuggccuucauccggaaguccgacgagcugcuccacaacgugaacgucggcaagagcaccacgaacaucaugaucaccaccaucaucaucgugaucaucgugauccugcugcuccugaucgccgucgggcuguuccucuacugcaaggcccgcuccacccccgugacgcugagcaaggaccagcuguccgggaucaacaacaucgcguucagcaacugaggacuagucccuguucccagagcccacuuuuuuuucuuuuuuugaaauaaaauagccugucuuucagaucuaaaaaaaaaaaaaaaaaaaaaaaaaaaaaaaaaaaaaaaaaaaaaaaaaaaaaaaaaaaaaaaaaaaaaaaaaaaaaaaaaaaaaaaaaaaaaaaaaaaa

SEQ ID NO: 21637 - RNA, 1910 nt, Artificial Sequence
  mRNA product Design a-1 (A100) comprising derived and/or modified sequence from HRSV(Memphis-37)__AIY60640.1__F-del (opt1)
aggagagucccgcagucggcguccagcggcucugcuuguucgugugugugucguugcaggccuuauucaagcuuaccauggagcugcccauccucaagaccaacgccaucaccacgauccuggccgcggugacccugugcuucgccagcucccagaacaucaccgaggaguucuaccagagcacgugcuccgccgucagcaagggcuaccucuccgcccugcgcaccgggugguacaccagcgugaucaccaucgagcuguccaacaucaaggagaacaagugcaacggcaccgacgccaaggugaagcucaucaagcaggagcuggacaaguacaagaacgcggucacggagcugcagcuccugaugcagagcaccccggccgccaacaaccgggcccgccgggagcugccccgcuucaugaacuacacccucaacaacaccaagaacaacaacgugacgcuguccaagaagcggaagcgccgguuccugggguuccuccugggcguggggagcgcgaucgccuccggcaucgccgucagcaaggugcugcaccucgagggcgaggugaacaagaucaagaacgcccugcuguccaccaacaaggccgucgugagccucuccaacggggugagcguccugaccuccaaggugcuggaccucaagaacuacaucgacaagcagcugcugcccaucgugaacaagcagagcugcuccaucagcaacaucgagaccgucaucgaguuccagcagaagaacaaccgccuccuggagaucacgcgggaguucagcgugaacgcgggcgugaccacccccgucuccaccuacaugcugacgaacagcgagcuccugucccugaucaacgacaugccgaucaccaacgaccagaagaagcucaugagcaacaacgugcagaucgugcgccagcaguccuacagcaucauguccaucaucaaggaggagguccuggccuacguggugcagcugccccucuacggggucaucgacacccccugcuggaagcugcacaccagcccccugugcacgaccaacaccaaggagggcuccaacaucugccucacccggacggaccgcgggugguacugcgacaacgccggcagcguguccuucuucccgcaggccgagaccugcaagguccagagcaaccggguguucugcgacaccaugaacucccugacccugcccagcgaggugaaccucugcaacaucgacaucuucaaccccaaguacgacugcaagaucaugacguccaagaccgacgucagcuccagcgugaucaccucccugggcgccaucgugagcugcuacgggaagaccaagugcacggcgagcaacaagaaccgcggcaucaucaagaccuucuccaacgggugcgacuacgucagcaacaagggcguggacaccguguccgucggcaacacccuguacuacgugaacaagcaggagggcaagagccucuacgugaagggggagcccaucaucaacuucuacgacccgcuggucuuccccuccgacgaguucgacgccagcaucucccaggugaacgagaagaucaaccagagccuggccuucauccggaaguccgacgagcuccugcacaacgugaacgucggcaagagcaccacgaacaucaugaucaccaccaucaucaucgugaucaucgugauccugcugcuccugaucgccgucgggcuguuccucuacugcaaggcccgcugaggacuagucccuguucccagagcccacuuuuuuuucuuuuuuugaaauaaaauagccugucuuucagaucuaaaaaaaaaaaaaaaaaaaaaaaaaaaaaaaaaaaaaaaaaaaaaaaaaaaaaaaaaaaaaaaaaaaaaaaaaaaaaaaaaaaaaaaaaaaaaaaaaaaa

SEQ ID NO: 21638 - RNA, 1910 nt, Artificial Sequence
  mRNA product Design a-1 (A100) comprising derived and/or modified sequence from HRSV(Memphis-37)__AIY60640.1__F-del (opt1)
aggagagucccgcagucggcguccagcggcucugcuuguucgugugugugucguugcaggccuuauucaagcuuaccauggagcugcccauccucaagaccaacgccaucaccacgauccuggccgcggugacccugugcuucgccagcucccagaacaucaccgaggaguucuaccagagcacgugcuccgccgucagcaagggcuaccucuccgcccugcgcaccgggugguacaccagcgugaucaccaucgagcuguccaacaucaaggagaacaagugcaacggcaccgacgccaaggugaagcucaucaagcaggagcuggacaaguacaagaacgcggucacggagcugcagcuccugaugcagagcaccccggccgccaacaaccgggcccgccgggagcugccccgcuucaugaacuacacccucaacaacaccaagaacaacaacgugacgcuguccaagaagcggaagcgccgguuccugggguuccuccugggcguggggagcgcgaucgccuccggcaucgccgucagcaaggugcugcaccucgagggcgaggugaacaagaucaagaacgcccugcuguccaccaacaaggccgucgugagccucuccaacggggugagcguccugaccuccaaggugcuggaccucaagaacuacaucgacaagcagcugcugcccaucgugaacaagcagagcugcuccaucagcaacaucgagaccgucaucgaguuccagcagaagaacaaccgccuccuggagaucacgcgggaguucagcgugaacgcgggcgugaccacccccgucuccaccuacaugcugacgaacagcgagcuccugucccugaucaacgacaugccgaucaccaacgaccagaagaagcucaugagcaacaacgugcagaucgugcgccagcaguccuacagcaucauguccaucaucaaggaggagguccuggccuacguggugcagcugccccucuacggggucaucgacacccccugcuggaagcugcacaccagcccccugugcacgaccaacaccaaggagggcuccaacaucugccucacccggacggaccgcgggugguacugcgacaacgccggcagcguguccuucuucccgcaggccgagaccugcaagguccagagcaaccggguguucugcgacaccaugaacucccugacccugcccagcgaggugaaccucugcaacaucgacaucuucaaccccaaguacgacugcaagaucaugacguccaagaccgacgucagcuccagcgugaucaccucccugggcgccaucgugagcugcuacgggaagaccaagugcacggcgagcaacaagaaccgcggcaucaucaagaccuucuccaacgggugcgacuacgucagcaacaagggcguggacaccguguccgucggcaacacccuguacuacgugaacaagcaggagggcaagagccucuacgugaagggggagcccaucaucaacuucuacgacccgcuggucuuccccuccgacgaguucgacgccagcaucucccaggugaacgagaagaucaaccagagccuggccuucauccggaaguccgacgagcugcuccacaacgugaacgucggcaagagcaccacgaacaucaugaucaccaccaucaucaucgugaucaucgugauccugcugcuccugaucgccgucgggcuguuccucuacugcaaggcccgcugaggacuagucccuguucccagagcccacuuuuuuuucuuuuuuugaaauaaaauagccugucuuucagaucuaaaaaaaaaaaaaaaaaaaaaaaaaaaaaaaaaaaaaaaaaaaaaaaaaaaaaaaaaaaaaaaaaaaaaaaaaaaaaaaaaaaaaaaaaaaaaaaaaaaa

SEQ ID NO: 21639 - RNA, 1973 nt, Artificial Sequence
  mRNA product Design a-1 (A100) comprising derived and/or modified sequence from HRSV(Memphis-37)__AIY60640.1__F0_DSCav1 (opt1)
aggagagucccgcagucggcguccagcggcucugcuuguucgugugugugucguugcaggccuuauucaagcuuaccauggagcugcccauccucaagaccaacgccaucaccacgauccuggccgcggugacccugugcuucgccagcucccagaacaucaccgaggaguucuaccagagcacgugcuccgccgucagcaagggcuaccucuccgcccugcgcaccgggugguacaccagcgugaucaccaucgagcuguccaacaucaaggagaacaagugcaacggcaccgacgccaaggugaagcucaucaagcaggagcuggacaaguacaagaacgcggucacggagcugcagcuccugaugcagagcaccccggccgccaacaaccgggcccgccgggagcugccccgcuucaugaacuacacccucaacaacaccaagaacaacaacgugacgcuguccaagaagcggaagcgccgguuccugggguuccuccugggcguggggagcgcgaucgccuccggcaucgccgucugcaaggugcugcaccucgagggcgaggugaacaagaucaagaacgcccugcuguccaccaacaaggccgucgugagccucuccaacggggugagcguccugaccuucaaggugcuggaccucaagaacuacaucgacaagcagcugcugcccauccugaacaagcagagcugcuccaucagcaacaucgagaccgucaucgaguuccagcagaagaacaaccgccuccuggagaucacgcgggaguucagcgugaacgcgggcgugaccacccccgucuccaccuacaugcugacgaacagcgagcuccugucccugaucaacgacaugccgaucaccaacgaccagaagaagcucaugagcaacaacgugcagaucgugcgccagcaguccuacagcaucaugugcaucaucaaggaggagguccuggccuacguggugcagcugccccucuacggggucaucgacacccccugcuggaagcugcacaccagcccccugugcacgaccaacaccaaggagggcuccaacaucugccucacccggacggaccgcgggugguacugcgacaacgccggcagcguguccuucuucccgcaggccgagaccugcaagguccagagcaaccggguguucugcgacaccaugaacucccugacccugcccagcgaggugaaccucugcaacaucgacaucuucaaccccaaguacgacugcaagaucaugacguccaagaccgacgucagcuccagcgugaucaccucccugggcgccaucgugagcugcuacgggaagaccaagugcacggcgagcaacaagaaccgcggcaucaucaagaccuucuccaacgggugcgacuacgucagcaacaagggcguggacaccguguccgucggcaacacccuguacuacgugaacaagcaggagggcaagagccucuacgugaagggggagcccaucaucaacuucuacgacccgcuggucuuccccuccgacgaguucgacgccagcaucucccaggugaacgagaagaucaaccagagccuggccuucauccggaaguccgacgagcuccugcacaacgugaacgucggcaagagcaccacgaacaucaugaucaccaccaucaucaucgugaucaucgugauccugcugcuccugaucgccgucgggcuguuccucuacugcaaggcccgcuccacccccgugacgcugagcaaggaccagcuguccgggaucaacaacaucgcguucagcaacugaggacuagucccuguucccagagcccacuuuuuuuucuuuuuuugaaauaaaauagccugucuuucagaucuaaaaaaaaaaaaaaaaaaaaaaaaaaaaaaaaaaaaaaaaaaaaaaaaaaaaaaaaaaaaaaaaaaaaaaaaaaaaaaaaaaaaaaaaaaaaaaaaaaaa

SEQ ID NO: 21640 - RNA, 1973 nt, Artificial Sequence
  mRNA product Design a-1 (A100) comprising derived and/or modified sequence from HRSV(Memphis-37)__AIY60640.1__F0_DSCav1 (opt1)
aggagagucccgcagucggcguccagcggcucugcuuguucgugugugugucguugcaggccuuauucaagcuuaccauggagcugcccauccucaagaccaacgccaucaccacgauccuggccgcggugacccugugcuucgccagcucccagaacaucaccgaggaguucuaccagagcacgugcuccgccgucagcaagggcuaccucuccgcccugcgcaccgggugguacaccagcgugaucaccaucgagcuguccaacaucaaggagaacaagugcaacggcaccgacgccaaggugaagcucaucaagcaggagcuggacaaguacaagaacgcggucacggagcugcagcuccugaugcagagcaccccggccgccaacaaccgggcccgccgggagcugccccgcuucaugaacuacacccucaacaacaccaagaacaacaacgugacgcuguccaagaagcggaagcgccgguuccugggguuccuccugggcguggggagcgcgaucgccuccggcaucgccgucugcaaggugcugcaccucgagggcgaggugaacaagaucaagaacgcccugcugagcaccaacaaggccgucgugucccucagcaacgggguguccguccugaccuucaaggugcuggaccucaagaacuacaucgacaagcagcugcugcccauccucaacaagcagagcugcuccaucagcaacaucgagaccgugaucgaguuccagcagaagaacaaccgccugcuggagaucacgcgggaguucuccgucaacgcgggcgugaccacccccgugagcaccuacaugcucacgaacagcgagcugcugucccucaucaacgacaugccgaucaccaacgaccagaagaagcugaugagcaacaacguccagaucgugcgccagcaguccuacagcaucaugugcaucaucaaggaggaggugcuggccuacgucgugcagcucccccuguacggggugaucgacacccccugcuggaagcugcacaccagcccccucugcacgaccaacaccaaggagggcagcaacaucugccugacccggacggaccgcgggugguacugcgacaacgccggcuccgucagcuucuucccgcaggccgagaccugcaaggugcaguccaaccgggucuucugcgacaccaugaacagccugacccuccccuccgaggugaaccugugcaacaucgacaucuucaaccccaaguacgacugcaagaucaugacgagcaagaccgacguguccagcuccgucaucaccagccugggcgccaucguguccugcuacgggaagaccaagugcacggcgagcaacaagaaccgcggcaucaucaagaccuucuccaacgggugcgacuacgugagcaacaagggcgucgacaccgugagcgugggcaacacccucuacuacgucaacaagcaggaggggaagucccuguacgugaagggcgagcccaucaucaacuucuacgacccgcugguguuccccagcgacgaguucgacgccuccaucagccaggucaacgagaagaucaaccagucccucgccuucauccggaaguccgacgagcugcugcacaacgugaacguggggaaguccaccacgaacaucaugaucaccaccaucaucaucgucaucaucgugauccugcuccugcugaucgccgugggccucuuccuguacugcaaggcccgcagcacccccgucacgcuguccaaggaccagcucagcgggaucaacaacaucgcguucuccaacugaggacuagucccuguucccagagcccacuuuuuuuucuuuuuuugaaauaaaauagccugucuuucagaucuaaaaaaaaaaaaaaaaaaaaaaaaaaaaaaaaaaaaaaaaaaaaaaaaaaaaaaaaaaaaaaaaaaaaaaaaaaaaaaaaaaaaaaaaaaaaaaaaaaaa

SEQ ID NO: 21641 - RNA, 1973 nt, Artificial Sequence
  mRNA product Design a-1 (A100) comprising derived and/or modified sequence from HRSV(Memphis-37)__AIY60640.1__F0_DSCav1 (opt1)
aggagagucccgcagucggcguccagcggcucugcuuguucgugugugugucguugcaggccuuauucaagcuuaccauggagcugcccauccucaagaccaacgccaucaccacgauccuggccgcggugacccugugcuucgccagcucccagaacaucaccgaggaguucuaccagagcacgugcuccgccgucagcaagggcuaccucuccgcccugcgcaccgggugguacaccagcgugaucaccaucgagcuguccaacaucaaggagaacaagugcaacggcaccgacgccaaggugaagcucaucaagcaggagcuggacaaguacaagaacgcggucacggagcugcagcuccugaugcagagcaccccggccgccaacaaccgggcccgccgggagcugccccgcuucaugaacuacacccucaacaacaccaagaacaacaacgugacgcuguccaagaagcggaagcgccgguuccugggguuccuccugggcguggggagcgcgaucgccuccggcaucgccgucugcaaggugcugcaccucgagggcgaggugaacaagaucaagaacgcccugcugagcaccaacaaggccgucgugucccucagcaacgggguguccguccugaccuucaaggugcuggaccucaagaacuacaucgacaagcagcugcugcccauccucaacaagcagagcugcuccaucagcaacaucgagaccgugaucgaguuccagcagaagaacaaccgccugcuggagaucacgcgggaguucuccgucaacgcgggcgugaccacccccgugagcaccuacaugcucacgaacagcgagcugcugucccucaucaacgacaugccgaucaccaacgaccagaagaagcugaugagcaacaacguccagaucgugcgccagcaguccuacagcaucaugugcaucaucaaggaggaggugcuggccuacgucgugcagcucccccuguacggggugaucgacacccccugcuggaagcugcacaccagcccccucugcacgaccaacaccaaggagggcagcaacaucugccugacccggacggaccgcgggugguacugcgacaacgccggcuccgucagcuucuucccgcaggccgagaccugcaaggugcaguccaaccgggucuucugcgacaccaugaacagccugacccuccccuccgaggugaaccugugcaacaucgacaucuucaaccccaaguacgacugcaagaucaugacgagcaagaccgacguguccagcuccgucaucaccagccugggcgccaucguguccugcuacgggaagaccaagugcacggcgagcaacaagaaccgcggcaucaucaagaccuucuccaacgggugcgacuacgugagcaacaagggcgucgacaccgugagcgugggcaacacccucuacuacgucaacaagcaggaggggaagucccuguacgugaagggcgagcccaucaucaacuucuacgacccgcugguguuccccagcgacgaguucgacgccuccaucagccaggucaacgagaagaucaaccagucccuggccuucauccggaaguccgacgagcuccugcacaacgugaacguggggaaguccaccacgaacaucaugaucaccaccaucaucaucgucaucaucgugauccugcuccugcugaucgccgugggccucuuccuguacugcaaggcccgcagcacccccgucacgcuguccaaggaccagcucagcgggaucaacaacaucgcguucuccaacugaggacuagucccuguucccagagcccacuuuuuuuucuuuuuuugaaauaaaauagccugucuuucagaucuaaaaaaaaaaaaaaaaaaaaaaaaaaaaaaaaaaaaaaaaaaaaaaaaaaaaaaaaaaaaaaaaaaaaaaaaaaaaaaaaaaaaaaaaaaaaaaaaaaaa

SEQ ID NO: 21642 - RNA, 1910 nt, Artificial Sequence
  mRNA product Design a-1 (A100) comprising derived and/or modified sequence from HRSV(Memphis-37)__AIY60640.1__F-del_DSCav1 (opt1)
aggagagucccgcagucggcguccagcggcucugcuuguucgugugugugucguugcaggccuuauucaagcuuaccauggagcugcccauccucaagaccaacgccaucaccacgauccuggccgcggugacccugugcuucgccagcucccagaacaucaccgaggaguucuaccagagcacgugcuccgccgucagcaagggcuaccucuccgcccugcgcaccgggugguacaccagcgugaucaccaucgagcuguccaacaucaaggagaacaagugcaacggcaccgacgccaaggugaagcucaucaagcaggagcuggacaaguacaagaacgcggucacggagcugcagcuccugaugcagagcaccccggccgccaacaaccgggcccgccgggagcugccccgcuucaugaacuacacccucaacaacaccaagaacaacaacgugacgcuguccaagaagcggaagcgccgguuccugggguuccuccugggcguggggagcgcgaucgccuccggcaucgccgucugcaaggugcugcaccucgagggcgaggugaacaagaucaagaacgcccugcuguccaccaacaaggccgucgugagccucuccaacggggugagcguccugaccuucaaggugcuggaccucaagaacuacaucgacaagcagcugcugcccauccugaacaagcagagcugcuccaucagcaacaucgagaccgucaucgaguuccagcagaagaacaaccgccuccuggagaucacgcgggaguucagcgugaacgcgggcgugaccacccccgucuccaccuacaugcugacgaacagcgagcuccugucccugaucaacgacaugccgaucaccaacgaccagaagaagcucaugagcaacaacgugcagaucgugcgccagcaguccuacagcaucaugugcaucaucaaggaggagguccuggccuacguggugcagcugccccucuacggggucaucgacacccccugcuggaagcugcacaccagcccccugugcacgaccaacaccaaggagggcuccaacaucugccucacccggacggaccgcgggugguacugcgacaacgccggcagcguguccuucuucccgcaggccgagaccugcaagguccagagcaaccggguguucugcgacaccaugaacucccugacccugcccagcgaggugaaccucugcaacaucgacaucuucaaccccaaguacgacugcaagaucaugacguccaagaccgacgucagcuccagcgugaucaccucccugggcgccaucgugagcugcuacgggaagaccaagugcacggcgagcaacaagaaccgcggcaucaucaagaccuucuccaacgggugcgacuacgucagcaacaagggcguggacaccguguccgucggcaacacccuguacuacgugaacaagcaggagggcaagagccucuacgugaagggggagcccaucaucaacuucuacgacccgcuggucuuccccuccgacgaguucgacgccagcaucucccaggugaacgagaagaucaaccagagccuggccuucauccggaaguccgacgagcuccugcacaacgugaacgucggcaagagcaccacgaacaucaugaucaccaccaucaucaucgugaucaucgugauccugcugcuccugaucgccgucgggcuguuccucuacugcaaggcccgcugaggacuagucccuguucccagagcccacuuuuuuuucuuuuuuugaaauaaaauagccugucuuucagaucuaaaaaaaaaaaaaaaaaaaaaaaaaaaaaaaaaaaaaaaaaaaaaaaaaaaaaaaaaaaaaaaaaaaaaaaaaaaaaaaaaaaaaaaaaaaaaaaaaaaa

SEQ ID NO: 21643 - RNA, 1910 nt, Artificial Sequence
  mRNA product Design a-1 (A100) comprising derived and/or modified sequence from HRSV(Memphis-37)__AIY60640.1__F-del_DSCav1 (opt1)
aggagagucccgcagucggcguccagcggcucugcuuguucgugugugugucguugcaggccuuauucaagcuuaccauggagcugcccauccucaagaccaacgccaucaccacgauccuggccgcggugacccugugcuucgccagcucccagaacaucaccgaggaguucuaccagagcacgugcuccgccgucagcaagggcuaccucuccgcccugcgcaccgggugguacaccagcgugaucaccaucgagcuguccaacaucaaggagaacaagugcaacggcaccgacgccaaggugaagcucaucaagcaggagcuggacaaguacaagaacgcggucacggagcugcagcuccugaugcagagcaccccggccgccaacaaccgggcccgccgggagcugccccgcuucaugaacuacacccucaacaacaccaagaacaacaacgugacgcuguccaagaagcggaagcgccgguuccugggguuccuccugggcguggggagcgcgaucgccuccggcaucgccgucugcaaggugcugcaccucgagggcgaggugaacaagaucaagaacgcccugcugagcaccaacaaggccgucgugucccucagcaacgggguguccguccugaccuucaaggugcuggaccucaagaacuacaucgacaagcagcugcugcccauccucaacaagcagagcugcuccaucagcaacaucgagaccgugaucgaguuccagcagaagaacaaccgccugcuggagaucacgcgggaguucuccgucaacgcgggcgugaccacccccgugagcaccuacaugcucacgaacagcgagcugcugucccucaucaacgacaugccgaucaccaacgaccagaagaagcugaugagcaacaacguccagaucgugcgccagcaguccuacagcaucaugugcaucaucaaggaggaggugcuggccuacgucgugcagcucccccuguacggggugaucgacacccccugcuggaagcugcacaccagcccccucugcacgaccaacaccaaggagggcagcaacaucugccugacccggacggaccgcgggugguacugcgacaacgccggcuccgucagcuucuucccgcaggccgagaccugcaaggugcaguccaaccgggucuucugcgacaccaugaacagccugacccuccccuccgaggugaaccugugcaacaucgacaucuucaaccccaaguacgacugcaagaucaugacgagcaagaccgacguguccagcuccgucaucaccagccugggcgccaucguguccugcuacgggaagaccaagugcacggcgagcaacaagaaccgcggcaucaucaagaccuucuccaacgggugcgacuacgugagcaacaagggcgucgacaccgugagcgugggcaacacccucuacuacgucaacaagcaggaggggaagucccuguacgugaagggcgagcccaucaucaacuucuacgacccgcugguguuccccagcgacgaguucgacgccuccaucagccaggucaacgagaagaucaaccagucccucgccuucauccggaaguccgacgagcugcugcacaacgugaacguggggaaguccaccacgaacaucaugaucaccaccaucaucaucgucaucaucgugauccugcuccugcugaucgccgugggccucuuccuguacugcaaggcccgcugaggacuagucccuguucccagagcccacuuuuuuuucuuuuuuugaaauaaaauagccugucuuucagaucuaaaaaaaaaaaaaaaaaaaaaaaaaaaaaaaaaaaaaaaaaaaaaaaaaaaaaaaaaaaaaaaaaaaaaaaaaaaaaaaaaaaaaaaaaaaaaaaaaaaa

SEQ ID NO: 21644 - RNA, 1910 nt, Artificial Sequence
  mRNA product Design a-1 (A100) comprising derived and/or modified sequence from HRSV(Memphis-37)__AIY60640.1__F-del_DSCav1 (opt1)
aggagagucccgcagucggcguccagcggcucugcuuguucgugugugugucguugcaggccuuauucaagcuuaccauggagcugcccauccucaagaccaacgccaucaccacgauccuggccgcggugacccugugcuucgccagcucccagaacaucaccgaggaguucuaccagagcacgugcuccgccgucagcaagggcuaccucuccgcccugcgcaccgggugguacaccagcgugaucaccaucgagcuguccaacaucaaggagaacaagugcaacggcaccgacgccaaggugaagcucaucaagcaggagcuggacaaguacaagaacgcggucacggagcugcagcuccugaugcagagcaccccggccgccaacaaccgggcccgccgggagcugccccgcuucaugaacuacacccucaacaacaccaagaacaacaacgugacgcuguccaagaagcggaagcgccgguuccugggguuccuccugggcguggggagcgcgaucgccuccggcaucgccgucugcaaggugcugcaccucgagggcgaggugaacaagaucaagaacgcccugcugagcaccaacaaggccgucgugucccucagcaacgggguguccguccugaccuucaaggugcuggaccucaagaacuacaucgacaagcagcugcugcccauccucaacaagcagagcugcuccaucagcaacaucgagaccgugaucgaguuccagcagaagaacaaccgccugcuggagaucacgcgggaguucuccgucaacgcgggcgugaccacccccgugagcaccuacaugcucacgaacagcgagcugcugucccucaucaacgacaugccgaucaccaacgaccagaagaagcugaugagcaacaacguccagaucgugcgccagcaguccuacagcaucaugugcaucaucaaggaggaggugcuggccuacgucgugcagcucccccuguacggggugaucgacacccccugcuggaagcugcacaccagcccccucugcacgaccaacaccaaggagggcagcaacaucugccugacccggacggaccgcgggugguacugcgacaacgccggcuccgucagcuucuucccgcaggccgagaccugcaaggugcaguccaaccgggucuucugcgacaccaugaacagccugacccuccccuccgaggugaaccugugcaacaucgacaucuucaaccccaaguacgacugcaagaucaugacgagcaagaccgacguguccagcuccgucaucaccagccugggcgccaucguguccugcuacgggaagaccaagugcacggcgagcaacaagaaccgcggcaucaucaagaccuucuccaacgggugcgacuacgugagcaacaagggcgucgacaccgugagcgugggcaacacccucuacuacgucaacaagcaggaggggaagucccuguacgugaagggcgagcccaucaucaacuucuacgacccgcugguguuccccagcgacgaguucgacgccuccaucagccaggucaacgagaagaucaaccagucccuggccuucauccggaaguccgacgagcuccugcacaacgugaacguggggaaguccaccacgaacaucaugaucaccaccaucaucaucgucaucaucgugauccugcuccugcugaucgccgugggccucuuccuguacugcaaggcccgcugaggacuagucccuguucccagagcccacuuuuuuuucuuuuuuugaaauaaaauagccugucuuucagaucuaaaaaaaaaaaaaaaaaaaaaaaaaaaaaaaaaaaaaaaaaaaaaaaaaaaaaaaaaaaaaaaaaaaaaaaaaaaaaaaaaaaaaaaaaaaaaaaaaaaa

SEQ ID NO: 21645 - RNA, 1856 nt, Artificial Sequence
  mRNA product Design a-1 (A100) comprising derived and/or modified sequence from HRSV(Memphis-37)__AIY60640.1__F_DSCav1_mut0 (opt1)
aggagagucccgcagucggcguccagcggcucugcuuguucgugugugugucguugcaggccuuauucaagcuuaccauggagcugcccauccucaagaccaacgccaucaccacgauccuggccgcggugacccugugcuucgccagcucccagaacaucaccgaggaguucuaccagagcacgugcuccgccgucagcaagggcuaccucuccgcccugcgcaccgggugguacaccagcgugaucaccaucgagcuguccaacaucaaggagaacaagugcaacggcaccgacgccaaggugaagcucaucaagcaggagcuggacaaguacaagaacgcggucacggagcugcagcuccugaugcagagcaccccggccgccggcuccgggagcgcgaucgccuccggcaucgccgucugcaaggugcugcaccucgagggcgaggugaacaagaucaagaacgcccugcuguccaccaacaaggccgucgugagccucuccaacggggugagcguccugaccuucaaggugcuggaccucaagaacuacaucgacaagcagcugcugcccauccugaacaagcagagcugcuccaucagcaacaucgagaccgucaucgaguuccagcagaagaacaaccgccuccuggagaucacgcgggaguucagcgugaacgcgggcgugaccacccccgucuccaccuacaugcugacgaacagcgagcuccugucccugaucaacgacaugccgaucaccaacgaccagaagaagcucaugagcaacaacgugcagaucgugcgccagcaguccuacagcaucaugugcaucaucaaggaggagguccuggccuacguggugcagcugccccucuacggggucaucgacacccccugcuggaagcugcacaccagcccccugugcacgaccaacaccaaggagggcuccaacaucugccucacccggacggaccgcgggugguacugcgacaacgccggcagcguguccuucuucccgcaggccgagaccugcaagguccagagcaaccggguguucugcgacaccaugaacucccggacccugcccagcgaggugaaccucugcaacaucgacaucuucaaccccaaguacgacugcaagaucaugacguccaagaccgacgucagcuccagcgugaucaccucccugggcgccaucgugagcugcuacgggaagaccaagugcacggcgagcaacaagaaccgcggcaucaucaagaccuucuccaacgggugcgacuacgucagcaacaagggcguggacaccguguccgucggcaacacccuguacuacgugaacaagcaggagggcaagagccucuacgugaagggggagcccaucaucaacuucuacgacccgcuggucuuccccuccgacgaguucgacgccagcaucucccaggugaacgagaagaucaaccagagccuggccuucauccggaaguccgacgagcuccugcacaacgugaacgucggcaagagcaccacgaacaucaugaucaccaccaucaucaucgugaucaucgugauccugcugcuccugaucgccgucgggcuguuccucuacugcaaggcccgcuccacccccgugacgcugagcaaggaccagcuguccgggaucaacaacaucgcguucagcaacugaggacuagucccuguucccagagcccacuuuuuuuucuuuuuuugaaauaaaauagccugucuuucagaucuaaaaaaaaaaaaaaaaaaaaaaaaaaaaaaaaaaaaaaaaaaaaaaaaaaaaaaaaaaaaaaaaaaaaaaaaaaaaaaaaaaaaaaaaaaaaaaaaaaaa

SEQ ID NO: 21646 - RNA, 1856 nt, Artificial Sequence
  mRNA product Design a-1 (A100) comprising derived and/or modified sequence from HRSV(Memphis-37)__AIY60640.1__F_DSCav1_mut0 (opt1)
aggagagucccgcagucggcguccagcggcucugcuuguucgugugugugucguugcaggccuuauucaagcuuaccauggagcugcccauccucaagaccaacgccaucaccacgauccuggccgcggugacccugugcuucgccagcucccagaacaucaccgaggaguucuaccagagcacgugcuccgccgucagcaagggcuaccucuccgcccugcgcaccgggugguacaccagcgugaucaccaucgagcuguccaacaucaaggagaacaagugcaacggcaccgacgccaaggugaagcucaucaagcaggagcuggacaaguacaagaacgcggucacggagcugcagcuccugaugcagagcaccccggccgccggguccggcagcgccaucgcguccgggaucgccgugugcaaggugcugcaccucgagggcgaggucaacaagaucaagaacgcccugcugagcaccaacaaggccguggugucccucagcaacggcgucuccgugcugaccuucaaggugcuggaccucaagaacuacaucgacaagcagcugcugcccauccucaacaagcagagcugcuccaucagcaacaucgagacggucaucgaguuccagcagaagaacaaccggcugcuggagaucacccgcgaguucuccgugaacgccggggugaccacccccgucagcacguacaugcucaccaacagcgagcugcugucccucaucaacgacaugcccaucaccaacgaccagaagaagcugaugagcaacaacgugcagaucgugcggcagcaguccuacagcaucaugugcaucaucaaggaggagguccuggcguacguggugcagcucccgcuguacggcgucaucgacacccccugcuggaagcugcacacgagcccccucugcaccaccaacaccaaggagggguccaacaucugccugacgcgcaccgaccggggcugguacugcgacaacgccggguccgugagcuucuucccccaggccgagaccugcaaggugcaguccaaccgcgucuucugcgacaccaugaacagccggacgcucccguccgaggugaaccugugcaacaucgacaucuucaaccccaaguacgacugcaagaucaugaccagcaagaccgacgucuccagcuccgugaucaccagccugggcgccaucguguccugcuacggcaagacgaagugcaccgccagcaacaagaaccgggggaucaucaagaccuucuccaacggcugcgacuacgucagcaacaaggggguggacaccgugagcgucggcaacacgcucuacuacgugaacaagcaggagggcaagucccuguacgugaagggggagcccaucaucaacuucuacgacccccuggucuucccgagcgacgaguucgacgcguccaucagccaggugaacgagaagaucaaccagucccucgccuucauccgcaagagcgacgagcugcugcacaacgugaacgucggcaaguccaccaccaacaucaugaucaccaccaucaucaucgugaucaucgugauccuccugcugcucaucgccgucgggcuguuccuguacugcaaggcccggagcacgcccgugacccuguccaaggaccagcucagcggcaucaacaacaucgccuucuccaacugaggacuagucccuguucccagagcccacuuuuuuuucuuuuuuugaaauaaaauagccugucuuucagaucuaaaaaaaaaaaaaaaaaaaaaaaaaaaaaaaaaaaaaaaaaaaaaaaaaaaaaaaaaaaaaaaaaaaaaaaaaaaaaaaaaaaaaaaaaaaaaaaaaaaa

SEQ ID NO: 21647 - RNA, 1856 nt, Artificial Sequence
  mRNA product Design a-1 (A100) comprising derived and/or modified sequence from HRSV(Memphis-37)__AIY60640.1__F_DSCav1_mut0 (opt1)
aggagagucccgcagucggcguccagcggcucugcuuguucgugugugugucguugcaggccuuauucaagcuuaccauggagcugcccauccucaagaccaacgccaucaccacgauccuggccgcggugacccugugcuucgccagcucccagaacaucaccgaggaguucuaccagagcacgugcuccgccgucagcaagggcuaccucuccgcccugcgcaccgggugguacaccagcgugaucaccaucgagcuguccaacaucaaggagaacaagugcaacggcaccgacgccaaggugaagcucaucaagcaggagcuggacaaguacaagaacgcggucacggagcugcagcuccugaugcagagcaccccggccgccggguccggcagcgccaucgcguccgggaucgccgugugcaaggugcugcaccucgagggcgaggucaacaagaucaagaacgcccugcugagcaccaacaaggccguggugucccucagcaacggcgucuccgugcugaccuucaaggugcuggaccucaagaacuacaucgacaagcagcugcugcccauccucaacaagcagagcugcuccaucagcaacaucgagacggucaucgaguuccagcagaagaacaaccggcugcuggagaucacccgcgaguucuccgugaacgccggggugaccacccccgucagcacguacaugcucaccaacagcgagcugcugucccucaucaacgacaugcccaucaccaacgaccagaagaagcugaugagcaacaacgugcagaucgugcggcagcaguccuacagcaucaugugcaucaucaaggaggagguccuggcguacguggugcagcucccgcuguacggcgucaucgacacccccugcuggaagcugcacacgagcccccucugcaccaccaacaccaaggaggggagcaacaucugccugacgcgcaccgaccggggcugguacugcgacaacgccggguccgugagcuucuucccccaggccgagaccugcaaggugcaguccaaccgcgucuucugcgacaccaugaacagccggacgcugccguccgaggugaaccucugcaacaucgacaucuucaaccccaaguacgacugcaagaucaugaccagcaagaccgacgucuccagcuccgugaucaccagccugggcgccaucguguccugcuacggcaagacgaagugcaccgccagcaacaagaaccgcgggaucaucaagaccuucuccaacggcugcgacuacgucagcaacaaggggguggacaccgugagcgucggcaacacgcuguacuacgugaacaagcaggagggcaagucccucuacgugaagggggagcccaucaucaacuucuacgacccccuggucuucccgagcgacgaguucgacgcguccaucagccaggugaacgagaagaucaaccagucccuggccuucauccggaaguccgacgagcuccugcacaacgugaacgucggcaaguccaccaccaacaucaugaucaccaccaucaucaucgugaucaucgugauccugcuccugcugaucgccgucgggcuguuccucuacugcaaggcccgcagcacgcccgugacccuguccaaggaccagcugagcggcaucaacaacaucgccuucuccaacugaggacuagucccuguucccagagcccacuuuuuuuucuuuuuuugaaauaaaauagccugucuuucagaucuaaaaaaaaaaaaaaaaaaaaaaaaaaaaaaaaaaaaaaaaaaaaaaaaaaaaaaaaaaaaaaaaaaaaaaaaaaaaaaaaaaaaaaaaaaaaaaaaaaaa

SEQ ID NO: 21648 - RNA, 1793 nt, Artificial Sequence
  mRNA product Design a-1 (A100) comprising derived and/or modified sequence from HRSV(Memphis-37)__AIY60640.1__F-del_DSCav1_mut0 (opt1)
aggagagucccgcagucggcguccagcggcucugcuuguucgugugugugucguugcaggccuuauucaagcuuaccauggagcugcccauccucaagaccaacgccaucaccacgauccuggccgcggugacccugugcuucgccagcucccagaacaucaccgaggaguucuaccagagcacgugcuccgccgucagcaagggcuaccucuccgcccugcgcaccgggugguacaccagcgugaucaccaucgagcuguccaacaucaaggagaacaagugcaacggcaccgacgccaaggugaagcucaucaagcaggagcuggacaaguacaagaacgcggucacggagcugcagcuccugaugcagagcaccccggccgccggcuccgggagcgcgaucgccuccggcaucgccgucugcaaggugcugcaccucgagggcgaggugaacaagaucaagaacgcccugcuguccaccaacaaggccgucgugagccucuccaacggggugagcguccugaccuucaaggugcuggaccucaagaacuacaucgacaagcagcugcugcccauccugaacaagcagagcugcuccaucagcaacaucgagaccgucaucgaguuccagcagaagaacaaccgccuccuggagaucacgcgggaguucagcgugaacgcgggcgugaccacccccgucuccaccuacaugcugacgaacagcgagcuccugucccugaucaacgacaugccgaucaccaacgaccagaagaagcucaugagcaacaacgugcagaucgugcgccagcaguccuacagcaucaugugcaucaucaaggaggagguccuggccuacguggugcagcugccccucuacggggucaucgacacccccugcuggaagcugcacaccagcccccugugcacgaccaacaccaaggagggcuccaacaucugccucacccggacggaccgcgggugguacugcgacaacgccggcagcguguccuucuucccgcaggccgagaccugcaagguccagagcaaccggguguucugcgacaccaugaacucccggacccugcccagcgaggugaaccucugcaacaucgacaucuucaaccccaaguacgacugcaagaucaugacguccaagaccgacgucagcuccagcgugaucaccucccugggcgccaucgugagcugcuacgggaagaccaagugcacggcgagcaacaagaaccgcggcaucaucaagaccuucuccaacgggugcgacuacgucagcaacaagggcguggacaccguguccgucggcaacacccuguacuacgugaacaagcaggagggcaagagccucuacgugaagggggagcccaucaucaacuucuacgacccgcuggucuuccccuccgacgaguucgacgccagcaucucccaggugaacgagaagaucaaccagagccuggccuucauccggaaguccgacgagcuccugcacaacgugaacgucggcaagagcaccacgaacaucaugaucaccaccaucaucaucgugaucaucgugauccugcugcuccugaucgccgucgggcuguuccucuacugcaaggcccgcugaggacuagucccuguucccagagcccacuuuuuuuucuuuuuuugaaauaaaauagccugucuuucagaucuaaaaaaaaaaaaaaaaaaaaaaaaaaaaaaaaaaaaaaaaaaaaaaaaaaaaaaaaaaaaaaaaaaaaaaaaaaaaaaaaaaaaaaaaaaaaaaaaaaaa

SEQ ID NO: 21649 - RNA, 1793 nt, Artificial Sequence
  mRNA product Design a-1 (A100) comprising derived and/or modified sequence from HRSV(Memphis-37)__AIY60640.1__F-del_DSCav1_mut0 (opt1)
aggagagucccgcagucggcguccagcggcucugcuuguucgugugugugucguugcaggccuuauucaagcuuaccauggagcugcccauccucaagaccaacgccaucaccacgauccuggccgcggugacccugugcuucgccagcucccagaacaucaccgaggaguucuaccagagcacgugcuccgccgucagcaagggcuaccucuccgcccugcgcaccgggugguacaccagcgugaucaccaucgagcuguccaacaucaaggagaacaagugcaacggcaccgacgccaaggugaagcucaucaagcaggagcuggacaaguacaagaacgcggucacggagcugcagcuccugaugcagagcaccccggccgccggguccggcagcgccaucgcguccgggaucgccgugugcaaggugcugcaccucgagggcgaggucaacaagaucaagaacgcccugcugagcaccaacaaggccguggugucccucagcaacggcgucuccgugcugaccuucaaggugcuggaccucaagaacuacaucgacaagcagcugcugcccauccucaacaagcagagcugcuccaucagcaacaucgagacggucaucgaguuccagcagaagaacaaccggcugcuggagaucacccgcgaguucuccgugaacgccggggugaccacccccgucagcacguacaugcucaccaacagcgagcugcugucccucaucaacgacaugcccaucaccaacgaccagaagaagcugaugagcaacaacgugcagaucgugcggcagcaguccuacagcaucaugugcaucaucaaggaggagguccuggcguacguggugcagcucccgcuguacggcgucaucgacacccccugcuggaagcugcacacgagcccccucugcaccaccaacaccaaggagggguccaacaucugccugacgcgcaccgaccggggcugguacugcgacaacgccggguccgugagcuucuucccccaggccgagaccugcaaggugcaguccaaccgcgucuucugcgacaccaugaacagccggacgcucccguccgaggugaaccugugcaacaucgacaucuucaaccccaaguacgacugcaagaucaugaccagcaagaccgacgucuccagcuccgugaucaccagccugggcgccaucguguccugcuacggcaagacgaagugcaccgccagcaacaagaaccgggggaucaucaagaccuucuccaacggcugcgacuacgucagcaacaaggggguggacaccgugagcgucggcaacacgcucuacuacgugaacaagcaggagggcaagucccuguacgugaagggggagcccaucaucaacuucuacgacccccuggucuucccgagcgacgaguucgacgcguccaucagccaggugaacgagaagaucaaccagucccucgccuucauccgcaagagcgacgagcugcugcacaacgugaacgucggcaaguccaccaccaacaucaugaucaccaccaucaucaucgugaucaucgugauccuccugcugcucaucgccgucgggcuguuccuguacugcaaggcccggugaggacuagucccuguucccagagcccacuuuuuuuucuuuuuuugaaauaaaauagccugucuuucagaucuaaaaaaaaaaaaaaaaaaaaaaaaaaaaaaaaaaaaaaaaaaaaaaaaaaaaaaaaaaaaaaaaaaaaaaaaaaaaaaaaaaaaaaaaaaaaaaaaaaaa

SEQ ID NO: 21650 - RNA, 1793 nt, Artificial Sequence
  mRNA product Design a-1 (A100) comprising derived and/or modified sequence from HRSV(Memphis-37)__AIY60640.1__F-del_DSCav1_mut0 (opt1)
aggagagucccgcagucggcguccagcggcucugcuuguucgugugugugucguugcaggccuuauucaagcuuaccauggagcugcccauccucaagaccaacgccaucaccacgauccuggccgcggugacccugugcuucgccagcucccagaacaucaccgaggaguucuaccagagcacgugcuccgccgucagcaagggcuaccucuccgcccugcgcaccgggugguacaccagcgugaucaccaucgagcuguccaacaucaaggagaacaagugcaacggcaccgacgccaaggugaagcucaucaagcaggagcuggacaaguacaagaacgcggucacggagcugcagcuccugaugcagagcaccccggccgccggguccggcagcgccaucgcguccgggaucgccgugugcaaggugcugcaccucgagggcgaggucaacaagaucaagaacgcccugcugagcaccaacaaggccguggugucccucagcaacggcgucuccgugcugaccuucaaggugcuggaccucaagaacuacaucgacaagcagcugcugcccauccucaacaagcagagcugcuccaucagcaacaucgagacggucaucgaguuccagcagaagaacaaccggcugcuggagaucacccgcgaguucuccgugaacgccggggugaccacccccgucagcacguacaugcucaccaacagcgagcugcugucccucaucaacgacaugcccaucaccaacgaccagaagaagcugaugagcaacaacgugcagaucgugcggcagcaguccuacagcaucaugugcaucaucaaggaggagguccuggcguacguggugcagcucccgcuguacggcgucaucgacacccccugcuggaagcugcacacgagcccccucugcaccaccaacaccaaggaggggagcaacaucugccugacgcgcaccgaccggggcugguacugcgacaacgccggguccgugagcuucuucccccaggccgagaccugcaaggugcaguccaaccgcgucuucugcgacaccaugaacagccggacgcugccguccgaggugaaccucugcaacaucgacaucuucaaccccaaguacgacugcaagaucaugaccagcaagaccgacgucuccagcuccgugaucaccagccugggcgccaucguguccugcuacggcaagacgaagugcaccgccagcaacaagaaccgcgggaucaucaagaccuucuccaacggcugcgacuacgucagcaacaaggggguggacaccgugagcgucggcaacacgcuguacuacgugaacaagcaggagggcaagucccucuacgugaagggggagcccaucaucaacuucuacgacccccuggucuucccgagcgacgaguucgacgcguccaucagccaggugaacgagaagaucaaccagucccuggccuucauccggaaguccgacgagcuccugcacaacgugaacgucggcaaguccaccaccaacaucaugaucaccaccaucaucaucgugaucaucgugauccugcuccugcugaucgccgucgggcuguuccucuacugcaaggcccgcugaggacuagucccuguucccagagcccacuuuuuuuucuuuuuuugaaauaaaauagccugucuuucagaucuaaaaaaaaaaaaaaaaaaaaaaaaaaaaaaaaaaaaaaaaaaaaaaaaaaaaaaaaaaaaaaaaaaaaaaaaaaaaaaaaaaaaaaaaaaaaaaaaaaaa

SEQ ID NO: 21651 - RNA, 1856 nt, Artificial Sequence
  mRNA product Design a-1 (A100) comprising derived and/or modified sequence from HRSV(Memphis-37)__AIY60640.1__F_DSCav1_mut1 (opt1)
aggagagucccgcagucggcguccagcggcucugcuuguucgugugugugucguugcaggccuuauucaagcuuaccauggagcugcccauccucaagaccaacgccaucaccacgauccuggccgcggugacccugugcuucgccagcucccagaacaucaccgaggaguucuaccagagcacgugcuccgccgucagcaagggcuaccucggcgcccugcgcaccgggugguacaccagcgugaucaccaucgagcuguccaacaucaaggagaacaagugcaacggcaccgacgccaaggugaagcucaucaagcaggagcuggacaaguacaagaacgcggucacggagcugcagcuccugaugcagagcaccccggccgccggcuccgggagcgcgaucugcuccggcaucgccgucugcaaggugcugcaccucgagggcgaggugaacaagaucaagaacgcccugcuguccaccaacaaggccgucgugagccucuccaacggggugagcguccugaccuucaaggugcuggaccucaagaacuacaucgacaagcagcugcugcccauccugaacaagcagagcugcuccauccccaacaucgagaccgucaucgaguuccagcagaagaacaaccgccuccuggagaucacgcgggaguucagcgugaacgcgggcgugaccacccccgucuccaccuacaugcugacgaacagcgagcuccugucccugaucaacgacaugccgaucaccaacgaccagaagaagcucaugagcaacaacgugcagaucgugcgccagcaguccuacagcaucaugugcaucaucaaggaggagguccuggccuacguggugcagcugccccucuacggggucaucgacacccccugcuggaagcugcacaccagcccccugugcacgaccaacaccaaggagggcuccaacaucugccucacccggacggaccgcgggugguacugcgacaacgccggcagcguguccuucuucccgcaggccgagaccugcaagguccagagcaaccggguguucugcgacaccaugaacucccugacccugcccagcgaggugaaccucugcaacaucgacaucuucaaccccaaguacgacugcaagaucaugacguccaagaccgacgucagcuccagcgugaucaccucccugggcgccaucgugagcugcuacgggaagaccaagugcacggcgagcaacaagaaccgcggcaucaucaagaccuucuccaacgggugcgacuacgucagcaacaagggcguggacaccguguccgucggcaacacccuguacugcgugaacaagcaggagggccagagccucuacgugaagggggagcccaucaucaacuucuacgacccgcuggucuuccccuccgacgaguucgacgccagcaucucccaggugaacgagaagaucaaccagagccuggccuucauccggaaguccgacgagcuccugcacaacgugaacgucggcaagagcaccacgaacaucaugaucaccaccaucaucaucgugaucaucgugauccugcugcuccugaucgccgucgggcuguuccucuacugcaaggcccgcuccacccccgugacgcugagcaaggaccagcuguccgggaucaacaacaucgcguucagcaacugaggacuagucccuguucccagagcccacuuuuuuuucuuuuuuugaaauaaaauagccugucuuucagaucuaaaaaaaaaaaaaaaaaaaaaaaaaaaaaaaaaaaaaaaaaaaaaaaaaaaaaaaaaaaaaaaaaaaaaaaaaaaaaaaaaaaaaaaaaaaaaaaaaaaa

SEQ ID NO: 21652 - RNA, 1856 nt, Artificial Sequence
  mRNA product Design a-1 (A100) comprising derived and/or modified sequence from HRSV(Memphis-37)__AIY60640.1__F_DSCav1_mut1 (opt1)
aggagagucccgcagucggcguccagcggcucugcuuguucgugugugugucguugcaggccuuauucaagcuuaccauggagcugcccauccucaagaccaacgccaucaccacgauccuggccgcggugacccugugcuucgccagcucccagaacaucaccgaggaguucuaccagagcacgugcuccgccgucagcaagggcuaccucggggcccugcgcaccggcugguacaccuccgugaucaccaucgagcugagcaacaucaaggagaacaagugcaacgggaccgacgccaaggugaagcucaucaagcaggagcuggacaaguacaagaacgcggucacggagcugcagcuccugaugcaguccaccccggccgccggcagcggguccgccaucugcagcggcaucgcggugugcaaggugcugcaccucgagggcgaggucaacaagaucaagaacgcccugcuguccaccaacaaggccguggugagccucuccaacggggucagcgugcugaccuucaaggugcuggaccucaagaacuacaucgacaagcagcugcugcccauccucaacaagcaguccugcagcauccccaacaucgagacggucaucgaguuccagcagaagaacaaccggcugcuggagaucacccgcgaguucuccgugaacgccggcgugaccacccccgucagcacguacaugcucaccaacuccgagcugcugagccucaucaacgacaugccgaucaccaacgaccagaagaagcugaugagcaacaacgugcagaucgugcggcagcaguccuacagcaucaugugcaucaucaaggaggagguccuggccuacguggugcagcucccccuguacggggucaucgacacccccugcuggaagcugcacacgagcccccucugcaccaccaacaccaaggagggcuccaacaucugccugacgcgcaccgaccgggggugguacugcgacaacgcgggcuccgugagcuucuucccgcaggccgagaccugcaaggugcaguccaaccgcgucuucugcgacaccaugaacagccugacgcuccccuccgaggugaaccugugcaacaucgacaucuucaaccccaaguacgacugcaagaucaugaccagcaagaccgacgucuccagcuccgugaucaccagccugggcgccaucguguccugcuacgggaagacgaagugcaccgccagcaacaagaaccggggcaucaucaagaccuucuccaacgggugcgacuacgucagcaacaagggcguggacaccguguccgucggcaacacgcucuacugcgugaacaagcaggaggggcagagccuguacgugaagggcgagcccaucaucaacuucuacgacccgcuggucuuccccagcgacgaguucgacgccuccaucagccaggugaacgagaagaucaaccagucccucgcguucauccgcaagagcgacgagcugcugcacaacgugaacgucgggaaguccaccaccaacaucaugaucaccaccaucaucaucgugaucaucgugauccuccugcugcucaucgccgucggccuguuccuguacugcaaggcccggagcacgcccgugacccuguccaaggaccagcucagcgggaucaacaacaucgccuucuccaacugaggacuagucccuguucccagagcccacuuuuuuuucuuuuuuugaaauaaaauagccugucuuucagaucuaaaaaaaaaaaaaaaaaaaaaaaaaaaaaaaaaaaaaaaaaaaaaaaaaaaaaaaaaaaaaaaaaaaaaaaaaaaaaaaaaaaaaaaaaaaaaaaaaaaa

SEQ ID NO: 21653 - RNA, 1856 nt, Artificial Sequence
  mRNA product Design a-1 (A100) comprising derived and/or modified sequence from HRSV(Memphis-37)__AIY60640.1__F_DSCav1_mut1 (opt1)
aggagagucccgcagucggcguccagcggcucugcuuguucgugugugugucguugcaggccuuauucaagcuuaccauggagcugcccauccucaagaccaacgccaucaccacgauccuggccgcggugacccugugcuucgccagcucccagaacaucaccgaggaguucuaccagagcacgugcuccgccgucagcaagggcuaccucggggcccugcgcaccggcugguacaccuccgugaucaccaucgagcugagcaacaucaaggagaacaagugcaacgggaccgacgccaaggugaagcucaucaagcaggagcuggacaaguacaagaacgcggucacggagcugcagcuccugaugcaguccaccccggccgccggcagcggguccgccaucugcagcggcaucgcggugugcaaggugcugcaccucgagggcgaggucaacaagaucaagaacgcccugcuguccaccaacaaggccguggugagccucuccaacggggucagcgugcugaccuucaaggugcuggaccucaagaacuacaucgacaagcagcugcugcccauccucaacaagcaguccugcagcauccccaacaucgagacggucaucgaguuccagcagaagaacaaccggcugcuggagaucacccgcgaguucuccgugaacgccggcgugaccacccccgucagcacguacaugcucaccaacuccgagcugcugagccucaucaacgacaugccgaucaccaacgaccagaagaagcugaugagcaacaacgugcagaucgugcggcagcaguccuacagcaucaugugcaucaucaaggaggagguccuggccuacguggugcagcucccccuguacggggucaucgacacccccugcuggaagcugcacacgagcccccucugcaccaccaacaccaaggagggcuccaacaucugccugacgcgcaccgaccgggggugguacugcgacaacgcgggcuccgugagcuucuucccgcaggccgagaccugcaaggugcaguccaaccgcgucuucugcgacaccaugaacagccugacgcuccccuccgaggugaaccugugcaacaucgacaucuucaaccccaaguacgacugcaagaucaugaccagcaagaccgacgucuccagcuccgugaucaccagccugggcgccaucguguccugcuacgggaagacgaagugcaccgccagcaacaagaaccggggcaucaucaagaccuucuccaacgggugcgacuacgucagcaacaagggcguggacaccguguccgucggcaacacgcucuacugcgugaacaagcaggaggggcagagccuguacgugaagggcgagcccaucaucaacuucuacgacccgcuggucuuccccagcgacgaguucgacgccuccaucagccaggugaacgagaagaucaaccagucccucgcguucauccgcaagagcgacgagcugcugcacaacgugaacgucgggaaguccaccaccaacaucaugaucaccaccaucaucaucgugaucaucgugauccuccugcugcugaucgccgucggccucuuccuguacugcaaggcccggagcacgcccgugacccuguccaaggaccagcucagcgggaucaacaacaucgccuucuccaacugaggacuagucccuguucccagagcccacuuuuuuuucuuuuuuugaaauaaaauagccugucuuucagaucuaaaaaaaaaaaaaaaaaaaaaaaaaaaaaaaaaaaaaaaaaaaaaaaaaaaaaaaaaaaaaaaaaaaaaaaaaaaaaaaaaaaaaaaaaaaaaaaaaaaa

SEQ ID NO: 21654 - RNA, 1793 nt, Artificial Sequence
  mRNA product Design a-1 (A100) comprising derived and/or modified sequence from HRSV(Memphis-37)__AIY60640.1__F-del_DSCav1_mut1 (opt1)
aggagagucccgcagucggcguccagcggcucugcuuguucgugugugugucguugcaggccuuauucaagcuuaccauggagcugcccauccucaagaccaacgccaucaccacgauccuggccgcggugacccugugcuucgccagcucccagaacaucaccgaggaguucuaccagagcacgugcuccgccgucagcaagggcuaccucggcgcccugcgcaccgggugguacaccagcgugaucaccaucgagcuguccaacaucaaggagaacaagugcaacggcaccgacgccaaggugaagcucaucaagcaggagcuggacaaguacaagaacgcggucacggagcugcagcuccugaugcagagcaccccggccgccggcuccgggagcgcgaucugcuccggcaucgccgucugcaaggugcugcaccucgagggcgaggugaacaagaucaagaacgcccugcuguccaccaacaaggccgucgugagccucuccaacggggugagcguccugaccuucaaggugcuggaccucaagaacuacaucgacaagcagcugcugcccauccugaacaagcagagcugcuccauccccaacaucgagaccgucaucgaguuccagcagaagaacaaccgccuccuggagaucacgcgggaguucagcgugaacgcgggcgugaccacccccgucuccaccuacaugcugacgaacagcgagcuccugucccugaucaacgacaugccgaucaccaacgaccagaagaagcucaugagcaacaacgugcagaucgugcgccagcaguccuacagcaucaugugcaucaucaaggaggagguccuggccuacguggugcagcugccccucuacggggucaucgacacccccugcuggaagcugcacaccagcccccugugcacgaccaacaccaaggagggcuccaacaucugccucacccggacggaccgcgggugguacugcgacaacgccggcagcguguccuucuucccgcaggccgagaccugcaagguccagagcaaccggguguucugcgacaccaugaacucccugacccugcccagcgaggugaaccucugcaacaucgacaucuucaaccccaaguacgacugcaagaucaugacguccaagaccgacgucagcuccagcgugaucaccucccugggcgccaucgugagcugcuacgggaagaccaagugcacggcgagcaacaagaaccgcggcaucaucaagaccuucuccaacgggugcgacuacgucagcaacaagggcguggacaccguguccgucggcaacacccuguacugcgugaacaagcaggagggccagagccucuacgugaagggggagcccaucaucaacuucuacgacccgcuggucuuccccuccgacgaguucgacgccagcaucucccaggugaacgagaagaucaaccagagccuggccuucauccggaaguccgacgagcuccugcacaacgugaacgucggcaagagcaccacgaacaucaugaucaccaccaucaucaucgugaucaucgugauccugcugcuccugaucgccgucgggcuguuccucuacugcaaggcccgcugaggacuagucccuguucccagagcccacuuuuuuuucuuuuuuugaaauaaaauagccugucuuucagaucuaaaaaaaaaaaaaaaaaaaaaaaaaaaaaaaaaaaaaaaaaaaaaaaaaaaaaaaaaaaaaaaaaaaaaaaaaaaaaaaaaaaaaaaaaaaaaaaaaaaa

SEQ ID NO: 21655 - RNA, 1793 nt, Artificial Sequence
  mRNA product Design a-1 (A100) comprising derived and/or modified sequence from HRSV(Memphis-37)__AIY60640.1__F-del_DSCav1_mut1 (opt1)
aggagagucccgcagucggcguccagcggcucugcuuguucgugugugugucguugcaggccuuauucaagcuuaccauggagcugcccauccucaagaccaacgccaucaccacgauccuggccgcggugacccugugcuucgccagcucccagaacaucaccgaggaguucuaccagagcacgugcuccgccgucagcaagggcuaccucggggcccugcgcaccggcugguacaccuccgugaucaccaucgagcugagcaacaucaaggagaacaagugcaacgggaccgacgccaaggugaagcucaucaagcaggagcuggacaaguacaagaacgcggucacggagcugcagcuccugaugcaguccaccccggccgccggcagcggguccgccaucugcagcggcaucgcggugugcaaggugcugcaccucgagggcgaggucaacaagaucaagaacgcccugcuguccaccaacaaggccguggugagccucuccaacggggucagcgugcugaccuucaaggugcuggaccucaagaacuacaucgacaagcagcugcugcccauccucaacaagcaguccugcagcauccccaacaucgagacggucaucgaguuccagcagaagaacaaccggcugcuggagaucacccgcgaguucuccgugaacgccggcgugaccacccccgucagcacguacaugcucaccaacuccgagcugcugagccucaucaacgacaugccgaucaccaacgaccagaagaagcugaugagcaacaacgugcagaucgugcggcagcaguccuacagcaucaugugcaucaucaaggaggagguccuggccuacguggugcagcucccccuguacggggucaucgacacccccugcuggaagcugcacacgagcccccucugcaccaccaacaccaaggagggcuccaacaucugccugacgcgcaccgaccgggggugguacugcgacaacgcgggcuccgugagcuucuucccgcaggccgagaccugcaaggugcaguccaaccgcgucuucugcgacaccaugaacagccugacgcuccccuccgaggugaaccugugcaacaucgacaucuucaaccccaaguacgacugcaagaucaugaccagcaagaccgacgucuccagcuccgugaucaccagccugggcgccaucguguccugcuacgggaagacgaagugcaccgccagcaacaagaaccggggcaucaucaagaccuucuccaacgggugcgacuacgucagcaacaagggcguggacaccguguccgucggcaacacgcucuacugcgugaacaagcaggaggggcagagccuguacgugaagggcgagcccaucaucaacuucuacgacccgcuggucuuccccagcgacgaguucgacgccuccaucagccaggugaacgagaagaucaaccagucccucgcguucauccgcaagagcgacgagcugcugcacaacgugaacgucgggaaguccaccaccaacaucaugaucaccaccaucaucaucgugaucaucgugauccuccugcugcucaucgccgucggccuguuccuguacugcaaggcccggugaggacuagucccuguucccagagcccacuuuuuuuucuuuuuuugaaauaaaauagccugucuuucagaucuaaaaaaaaaaaaaaaaaaaaaaaaaaaaaaaaaaaaaaaaaaaaaaaaaaaaaaaaaaaaaaaaaaaaaaaaaaaaaaaaaaaaaaaaaaaaaaaaaaaa

SEQ ID NO: 21656 - RNA, 1793 nt, Artificial Sequence
  mRNA product Design a-1 (A100) comprising derived and/or modified sequence from HRSV(Memphis-37)__AIY60640.1__F-del_DSCav1_mut1 (opt1)
aggagagucccgcagucggcguccagcggcucugcuuguucgugugugugucguugcaggccuuauucaagcuuaccauggagcugcccauccucaagaccaacgccaucaccacgauccuggccgcggugacccugugcuucgccagcucccagaacaucaccgaggaguucuaccagagcacgugcuccgccgucagcaagggcuaccucggggcccugcgcaccggcugguacaccuccgugaucaccaucgagcugagcaacaucaaggagaacaagugcaacgggaccgacgccaaggugaagcucaucaagcaggagcuggacaaguacaagaacgcggucacggagcugcagcuccugaugcaguccaccccggccgccggcagcggguccgccaucugcagcggcaucgcggugugcaaggugcugcaccucgagggcgaggucaacaagaucaagaacgcccugcuguccaccaacaaggccguggugagccucuccaacggggucagcgugcugaccuucaaggugcuggaccucaagaacuacaucgacaagcagcugcugcccauccucaacaagcaguccugcagcauccccaacaucgagacggucaucgaguuccagcagaagaacaaccggcugcuggagaucacccgcgaguucuccgugaacgccggcgugaccacccccgucagcacguacaugcucaccaacuccgagcugcugagccucaucaacgacaugccgaucaccaacgaccagaagaagcugaugagcaacaacgugcagaucgugcggcagcaguccuacagcaucaugugcaucaucaaggaggagguccuggccuacguggugcagcucccccuguacggggucaucgacacccccugcuggaagcugcacacgagcccccucugcaccaccaacaccaaggagggcuccaacaucugccugacgcgcaccgaccgggggugguacugcgacaacgcgggcuccgugagcuucuucccgcaggccgagaccugcaaggugcaguccaaccgcgucuucugcgacaccaugaacagccugacgcuccccuccgaggugaaccugugcaacaucgacaucuucaaccccaaguacgacugcaagaucaugaccagcaagaccgacgucuccagcuccgugaucaccagccugggcgccaucguguccugcuacgggaagacgaagugcaccgccagcaacaagaaccggggcaucaucaagaccuucuccaacgggugcgacuacgucagcaacaagggcguggacaccguguccgucggcaacacgcucuacugcgugaacaagcaggaggggcagagccuguacgugaagggcgagcccaucaucaacuucuacgacccgcuggucuuccccagcgacgaguucgacgccuccaucagccaggugaacgagaagaucaaccagucccucgcguucauccgcaagagcgacgagcugcugcacaacgugaacgucgggaaguccaccaccaacaucaugaucaccaccaucaucaucgugaucaucgugauccuccugcugcugaucgccgucggccucuuccuguacugcaaggcccggugaggacuagucccuguucccagagcccacuuuuuuuucuuuuuuugaaauaaaauagccugucuuucagaucuaaaaaaaaaaaaaaaaaaaaaaaaaaaaaaaaaaaaaaaaaaaaaaaaaaaaaaaaaaaaaaaaaaaaaaaaaaaaaaaaaaaaaaaaaaaaaaaaaaaa

SEQ ID NO: 21657 - RNA, 1856 nt, Artificial Sequence
  mRNA product Design a-1 (A100) comprising derived and/or modified sequence from HRSV(Memphis-37)__AIY60640.1__F_DSCav1_mut2 (opt1)
aggagagucccgcagucggcguccagcggcucugcuuguucgugugugugucguugcaggccuuauucaagcuuaccauggagcugcccauccucaagaccaacgccaucaccacgauccuggccgcggugacccugugcuucgccagcucccagaacaucaccgaggaguucuaccagagcacgugcuccgccgucagcaagggcuaccucggcgcccugcgcaccgggugguacaccagcgugaucaccaucgagcuguccaacaucaaggagaacaagugcaacggcaccgacgccaaggugaagcucaucaagcaggagcuggacaaguacaagaacgcggucacggaccugcagcuccugaugcagagcaccccggccgccggcuccgggagcgcgaucugcuccggcaucgccgucugcaaggugcugcaccucgagggcgaggugaacaagaucaagaacgcccugcuguccaccaacaaggccgucgugagccucuccaacggggugagcguccugaccuucaaggugcuggaccucaagaacuacaucgacaagcagcugcugcccauccugaacaagcagagcugcuccauccccaacaucgagaccgucaucgaguuccagcagaagaacaaccgccuccuggagaucacgcgggaguucagcgugaacgcgggcgugaccacccccgucuccaccuacaugcugacgaacagcgagcuccugucccugaucaacgacaugccgaucaccaacgaccagaagaagcucaugagcaacaacgugcagaucgugcgccagcaguccuacagcaucaugugcaucaucaaggaggagguccuggccuacguggugcagcugccccucuacggggucaucgacacccccugcuggaagcugcacaccagcccccugugcacgaccaacaccaaggagggcuccaacaucugccucacccggacggaccgcgggugguacugcgacaacgccggcagcguguccuucuucccgcaggccgagaccugcaagguccagagcaaccggguguucugcgacaccaugaacucccugacccugcccagcgaggugaaccucugcaacaucgacaucuucaaccccaaguacgacugcaagaucaugacguccaagaccgacgucagcuccagcgugaucaccucccugggcgccaucgugagcugcuacgggaagaccaagugcacggcgagcaacaagaaccgcggcaucaucaagaccuucuccaacgggugcgacuacgucagcaacaagggcguggacaccguguccgucggcaacacccuguacugcgugaacaagcaggagggccagagccucuacgugaagggggagcccaucaucaacuucuacgacccgcuggucuuccccuccgacgaguucgacgccagcaucucccaggugaacgagaagaucaaccagagccuggccuucauccggaaguccgacgagcuccugcacaacgugaacgucggcaagagcaccacgaacaucaugaucaccaccaucaucaucgugaucaucgugauccugcugcuccugaucgccgucgggcuguuccucuacugcaaggcccgcuccacccccgugacgcugagcaaggaccagcuguccgggaucaacaacaucgcguucagcaacugaggacuagucccuguucccagagcccacuuuuuuuucuuuuuuugaaauaaaauagccugucuuucagaucuaaaaaaaaaaaaaaaaaaaaaaaaaaaaaaaaaaaaaaaaaaaaaaaaaaaaaaaaaaaaaaaaaaaaaaaaaaaaaaaaaaaaaaaaaaaaaaaaaaaa

SEQ ID NO: 21658 - RNA, 1856 nt, Artificial Sequence
  mRNA product Design a-1 (A100) comprising derived and/or modified sequence from HRSV(Memphis-37)__AIY60640.1__F_DSCav1_mut2 (opt1)
aggagagucccgcagucggcguccagcggcucugcuuguucgugugugugucguugcaggccuuauucaagcuuaccauggagcugcccauccucaagaccaacgccaucaccacgauccuggccgcggugacccugugcuucgccagcucccagaacaucaccgaggaguucuaccagagcacgugcuccgccgucagcaagggcuaccucggggcccugcgcaccggcugguacaccuccgugaucaccaucgagcugagcaacaucaaggagaacaagugcaacgggaccgacgccaaggugaagcucaucaagcaggagcuggacaaguacaagaacgcggucacggaccugcagcuccugaugcaguccaccccggccgccggcagcggguccgccaucugcagcggcaucgcggugugcaaggugcugcaccucgagggcgaggucaacaagaucaagaacgcccugcuguccaccaacaaggccguggugagccucuccaacggggucagcgugcugaccuucaaggugcuggaccucaagaacuacaucgacaagcagcugcugcccauccucaacaagcaguccugcagcauccccaacaucgagacggucaucgaguuccagcagaagaacaaccggcugcuggagaucacccgcgaguucuccgugaacgccggcgugaccacccccgucagcacguacaugcucaccaacuccgagcugcugagccucaucaacgacaugccgaucaccaacgaccagaagaagcugaugagcaacaacgugcagaucgugcggcagcaguccuacagcaucaugugcaucaucaaggaggagguccuggccuacguggugcagcucccccuguacggggucaucgacacccccugcuggaagcugcacacgagcccccucugcaccaccaacaccaaggagggcuccaacaucugccugacgcgcaccgaccgggggugguacugcgacaacgcgggcuccgugagcuucuucccgcaggccgagaccugcaaggugcaguccaaccgcgucuucugcgacaccaugaacagccugacgcuccccuccgaggugaaccugugcaacaucgacaucuucaaccccaaguacgacugcaagaucaugaccagcaagaccgacgucuccagcuccgugaucaccagccugggcgccaucguguccugcuacgggaagacgaagugcaccgccagcaacaagaaccggggcaucaucaagaccuucuccaacgggugcgacuacgucagcaacaagggcguggacaccguguccgucggcaacacgcucuacugcgugaacaagcaggaggggcagagccuguacgugaagggcgagcccaucaucaacuucuacgacccgcuggucuuccccagcgacgaguucgacgccuccaucagccaggugaacgagaagaucaaccagucccucgcguucauccgcaagagcgacgagcugcugcacaacgugaacgucgggaaguccaccaccaacaucaugaucaccaccaucaucaucgugaucaucgugauccuccugcugcucaucgccgucggccuguuccuguacugcaaggcccggagcacgcccgugacccuguccaaggaccagcucagcgggaucaacaacaucgccuucuccaacugaggacuagucccuguucccagagcccacuuuuuuuucuuuuuuugaaauaaaauagccugucuuucagaucuaaaaaaaaaaaaaaaaaaaaaaaaaaaaaaaaaaaaaaaaaaaaaaaaaaaaaaaaaaaaaaaaaaaaaaaaaaaaaaaaaaaaaaaaaaaaaaaaaaaa

SEQ ID NO: 21659 - RNA, 1856 nt, Artificial Sequence
  mRNA product Design a-1 (A100) comprising derived and/or modified sequence from HRSV(Memphis-37)__AIY60640.1__F_DSCav1_mut2 (opt1)
aggagagucccgcagucggcguccagcggcucugcuuguucgugugugugucguugcaggccuuauucaagcuuaccauggagcugcccauccucaagaccaacgccaucaccacgauccuggccgcggugacccugugcuucgccagcucccagaacaucaccgaggaguucuaccagagcacgugcuccgccgucagcaagggcuaccucggggcccugcgcaccggcugguacaccuccgugaucaccaucgagcugagcaacaucaaggagaacaagugcaacgggaccgacgccaaggugaagcucaucaagcaggagcuggacaaguacaagaacgcggucacggaccugcagcuccugaugcaguccaccccggccgccggcagcggguccgccaucugcagcggcaucgcggugugcaaggugcugcaccucgagggcgaggucaacaagaucaagaacgcccugcuguccaccaacaaggccguggugagccucuccaacggggucagcgugcugaccuucaaggugcuggaccucaagaacuacaucgacaagcagcugcugcccauccucaacaagcaguccugcagcauccccaacaucgagacggucaucgaguuccagcagaagaacaaccggcugcuggagaucacccgcgaguucuccgugaacgccggcgugaccacccccgucagcacguacaugcucaccaacuccgagcugcugagccucaucaacgacaugccgaucaccaacgaccagaagaagcugaugagcaacaacgugcagaucgugcggcagcaguccuacagcaucaugugcaucaucaaggaggagguccuggccuacguggugcagcucccccuguacggggucaucgacacccccugcuggaagcugcacacgagcccccucugcaccaccaacaccaaggagggcuccaacaucugccugacgcgcaccgaccgggggugguacugcgacaacgcgggcuccgugagcuucuucccgcaggccgagaccugcaaggugcaguccaaccgcgucuucugcgacaccaugaacagccugacgcuccccuccgaggugaaccugugcaacaucgacaucuucaaccccaaguacgacugcaagaucaugaccagcaagaccgacgucuccagcuccgugaucaccagccugggcgccaucguguccugcuacgggaagacgaagugcaccgccagcaacaagaaccggggcaucaucaagaccuucuccaacgggugcgacuacgucagcaacaagggcguggacaccguguccgucggcaacacgcucuacugcgugaacaagcaggaggggcagagccuguacgugaagggcgagcccaucaucaacuucuacgacccgcuggucuuccccagcgacgaguucgacgccuccaucagccaggugaacgagaagaucaaccagucccucgcguucauccgcaagagcgacgagcugcugcacaacgugaacgucgggaaguccaccaccaacaucaugaucaccaccaucaucaucgugaucaucgugauccuccugcugcugaucgccgucggccucuuccuguacugcaaggcccggagcacgcccgugacccuguccaaggaccagcucagcgggaucaacaacaucgccuucuccaacugaggacuagucccuguucccagagcccacuuuuuuuucuuuuuuugaaauaaaauagccugucuuucagaucuaaaaaaaaaaaaaaaaaaaaaaaaaaaaaaaaaaaaaaaaaaaaaaaaaaaaaaaaaaaaaaaaaaaaaaaaaaaaaaaaaaaaaaaaaaaaaaaaaaaa

SEQ ID NO: 21660 - RNA, 1793 nt, Artificial Sequence
  mRNA product Design a-1 (A100) comprising derived and/or modified sequence from HRSV(Memphis-37)__AIY60640.1__F-del_DSCav1_mut2 (opt1)
aggagagucccgcagucggcguccagcggcucugcuuguucgugugugugucguugcaggccuuauucaagcuuaccauggagcugcccauccucaagaccaacgccaucaccacgauccuggccgcggugacccugugcuucgccagcucccagaacaucaccgaggaguucuaccagagcacgugcuccgccgucagcaagggcuaccucggcgcccugcgcaccgggugguacaccagcgugaucaccaucgagcuguccaacaucaaggagaacaagugcaacggcaccgacgccaaggugaagcucaucaagcaggagcuggacaaguacaagaacgcggucacggaccugcagcuccugaugcagagcaccccggccgccggcuccgggagcgcgaucugcuccggcaucgccgucugcaaggugcugcaccucgagggcgaggugaacaagaucaagaacgcccugcuguccaccaacaaggccgucgugagccucuccaacggggugagcguccugaccuucaaggugcuggaccucaagaacuacaucgacaagcagcugcugcccauccugaacaagcagagcugcuccauccccaacaucgagaccgucaucgaguuccagcagaagaacaaccgccuccuggagaucacgcgggaguucagcgugaacgcgggcgugaccacccccgucuccaccuacaugcugacgaacagcgagcuccugucccugaucaacgacaugccgaucaccaacgaccagaagaagcucaugagcaacaacgugcagaucgugcgccagcaguccuacagcaucaugugcaucaucaaggaggagguccuggccuacguggugcagcugccccucuacggggucaucgacacccccugcuggaagcugcacaccagcccccugugcacgaccaacaccaaggagggcuccaacaucugccucacccggacggaccgcgggugguacugcgacaacgccggcagcguguccuucuucccgcaggccgagaccugcaagguccagagcaaccggguguucugcgacaccaugaacucccugacccugcccagcgaggugaaccucugcaacaucgacaucuucaaccccaaguacgacugcaagaucaugacguccaagaccgacgucagcuccagcgugaucaccucccugggcgccaucgugagcugcuacgggaagaccaagugcacggcgagcaacaagaaccgcggcaucaucaagaccuucuccaacgggugcgacuacgucagcaacaagggcguggacaccguguccgucggcaacacccuguacugcgugaacaagcaggagggccagagccucuacgugaagggggagcccaucaucaacuucuacgacccgcuggucuuccccuccgacgaguucgacgccagcaucucccaggugaacgagaagaucaaccagagccuggccuucauccggaaguccgacgagcuccugcacaacgugaacgucggcaagagcaccacgaacaucaugaucaccaccaucaucaucgugaucaucgugauccugcugcuccugaucgccgucgggcuguuccucuacugcaaggcccgcugaggacuagucccuguucccagagcccacuuuuuuuucuuuuuuugaaauaaaauagccugucuuucagaucuaaaaaaaaaaaaaaaaaaaaaaaaaaaaaaaaaaaaaaaaaaaaaaaaaaaaaaaaaaaaaaaaaaaaaaaaaaaaaaaaaaaaaaaaaaaaaaaaaaaa

SEQ ID NO: 21661 - RNA, 1793 nt, Artificial Sequence
  mRNA product Design a-1 (A100) comprising derived and/or modified sequence from HRSV(Memphis-37)__AIY60640.1__F-del_DSCav1_mut2 (opt1)
aggagagucccgcagucggcguccagcggcucugcuuguucgugugugugucguugcaggccuuauucaagcuuaccauggagcugcccauccucaagaccaacgccaucaccacgauccuggccgcggugacccugugcuucgccagcucccagaacaucaccgaggaguucuaccagagcacgugcuccgccgucagcaagggcuaccucggggcccugcgcaccggcugguacaccuccgugaucaccaucgagcugagcaacaucaaggagaacaagugcaacgggaccgacgccaaggugaagcucaucaagcaggagcuggacaaguacaagaacgcggucacggaccugcagcuccugaugcaguccaccccggccgccggcagcggguccgccaucugcagcggcaucgcggugugcaaggugcugcaccucgagggcgaggucaacaagaucaagaacgcccugcuguccaccaacaaggccguggugagccucuccaacggggucagcgugcugaccuucaaggugcuggaccucaagaacuacaucgacaagcagcugcugcccauccucaacaagcaguccugcagcauccccaacaucgagacggucaucgaguuccagcagaagaacaaccggcugcuggagaucacccgcgaguucuccgugaacgccggcgugaccacccccgucagcacguacaugcucaccaacuccgagcugcugagccucaucaacgacaugccgaucaccaacgaccagaagaagcugaugagcaacaacgugcagaucgugcggcagcaguccuacagcaucaugugcaucaucaaggaggagguccuggccuacguggugcagcucccccuguacggggucaucgacacccccugcuggaagcugcacacgagcccccucugcaccaccaacaccaaggagggcuccaacaucugccugacgcgcaccgaccgggggugguacugcgacaacgcgggcuccgugagcuucuucccgcaggccgagaccugcaaggugcaguccaaccgcgucuucugcgacaccaugaacagccugacgcuccccuccgaggugaaccugugcaacaucgacaucuucaaccccaaguacgacugcaagaucaugaccagcaagaccgacgucuccagcuccgugaucaccagccugggcgccaucguguccugcuacgggaagacgaagugcaccgccagcaacaagaaccggggcaucaucaagaccuucuccaacgggugcgacuacgucagcaacaagggcguggacaccguguccgucggcaacacgcucuacugcgugaacaagcaggaggggcagagccuguacgugaagggcgagcccaucaucaacuucuacgacccgcuggucuuccccagcgacgaguucgacgccuccaucagccaggugaacgagaagaucaaccagucccucgcguucauccgcaagagcgacgagcugcugcacaacgugaacgucgggaaguccaccaccaacaucaugaucaccaccaucaucaucgugaucaucgugauccuccugcugcucaucgccgucggccuguuccuguacugcaaggcccggugaggacuagucccuguucccagagcccacuuuuuuuucuuuuuuugaaauaaaauagccugucuuucagaucuaaaaaaaaaaaaaaaaaaaaaaaaaaaaaaaaaaaaaaaaaaaaaaaaaaaaaaaaaaaaaaaaaaaaaaaaaaaaaaaaaaaaaaaaaaaaaaaaaaaa

SEQ ID NO: 21662 - RNA, 1793 nt, Artificial Sequence
  mRNA product Design a-1 (A100) comprising derived and/or modified sequence from HRSV(Memphis-37)__AIY60640.1__F-del_DSCav1_mut2 (opt1)
aggagagucccgcagucggcguccagcggcucugcuuguucgugugugugucguugcaggccuuauucaagcuuaccauggagcugcccauccucaagaccaacgccaucaccacgauccuggccgcggugacccugugcuucgccagcucccagaacaucaccgaggaguucuaccagagcacgugcuccgccgucagcaagggcuaccucggggcccugcgcaccggcugguacaccuccgugaucaccaucgagcugagcaacaucaaggagaacaagugcaacgggaccgacgccaaggugaagcucaucaagcaggagcuggacaaguacaagaacgcggucacggaccugcagcuccugaugcaguccaccccggccgccggcagcggguccgccaucugcagcggcaucgcggugugcaaggugcugcaccucgagggcgaggucaacaagaucaagaacgcccugcuguccaccaacaaggccguggugagccucuccaacggggucagcgugcugaccuucaaggugcuggaccucaagaacuacaucgacaagcagcugcugcccauccucaacaagcaguccugcagcauccccaacaucgagacggucaucgaguuccagcagaagaacaaccggcugcuggagaucacccgcgaguucuccgugaacgccggcgugaccacccccgucagcacguacaugcucaccaacuccgagcugcugagccucaucaacgacaugccgaucaccaacgaccagaagaagcugaugagcaacaacgugcagaucgugcggcagcaguccuacagcaucaugugcaucaucaaggaggagguccuggccuacguggugcagcucccccuguacggggucaucgacacccccugcuggaagcugcacacgagcccccucugcaccaccaacaccaaggagggcuccaacaucugccugacgcgcaccgaccgggggugguacugcgacaacgcgggcuccgugagcuucuucccgcaggccgagaccugcaaggugcaguccaaccgcgucuucugcgacaccaugaacagccugacgcuccccuccgaggugaaccugugcaacaucgacaucuucaaccccaaguacgacugcaagaucaugaccagcaagaccgacgucuccagcuccgugaucaccagccugggcgccaucguguccugcuacgggaagacgaagugcaccgccagcaacaagaaccggggcaucaucaagaccuucuccaacgggugcgacuacgucagcaacaagggcguggacaccguguccgucggcaacacgcucuacugcgugaacaagcaggaggggcagagccuguacgugaagggcgagcccaucaucaacuucuacgacccgcuggucuuccccagcgacgaguucgacgccuccaucagccaggugaacgagaagaucaaccagucccucgcguucauccgcaagagcgacgagcugcugcacaacgugaacgucgggaaguccaccaccaacaucaugaucaccaccaucaucaucgugaucaucgugauccuccugcugcugaucgccgucggccucuuccuguacugcaaggcccggugaggacuagucccuguucccagagcccacuuuuuuuucuuuuuuugaaauaaaauagccugucuuucagaucuaaaaaaaaaaaaaaaaaaaaaaaaaaaaaaaaaaaaaaaaaaaaaaaaaaaaaaaaaaaaaaaaaaaaaaaaaaaaaaaaaaaaaaaaaaaaaaaaaaaa

SEQ ID NO: 21663 - RNA, 1856 nt, Artificial Sequence
  mRNA product Design a-1 (A100) comprising derived and/or modified sequence from HRSV(Memphis-37)__AIY60640.1__F_DSCav1_mut3 (opt1)
aggagagucccgcagucggcguccagcggcucugcuuguucgugugugugucguugcaggccuuauucaagcuuaccauggagcugcccauccucaagaccaacgccaucaccacgauccuggccgcggugacccugugcuucgccagcucccagaacaucaccgaggaguucuaccagagcacgugcuccgccgucagcaagggcuaccucggcgcccugcgcaccgggugguacaccagcgugaucaccaucgagcuguccaacaucaaggagaucaagugcaacggcaccgacgccaaggugaagcucaucaagcaggagcuggacaaguacaagaacgcggucacggaccugcagcuccugaugcagagcaccccggccgccggcuccgggagcgcgaucugcuccggcaucgccgucugcaaggugcugcaccucgagggcgaggugaacaagaucaagaacgcccugcuguccaccaacaaggccgucgugagccucuccaacggggugagcguccugaccuucaaggugcuggaccucaagaacuacaucgacaagcagcugcugcccauccugaacaagcagagcugcuccauccccaacaucgagaccgucaucgaguuccagcagaagaacaaccgccuccuggagaucacgcgggaguucagcgugaacgcgggcgugaccacccccgucuccaccuacaugcugacgaacagcgagcuccugucccugaucaacgacaugccgaucaccaacgaccagaagaagcucaugagcaacaacgugcagaucgugcgccagcaguccuacagcaucaugugcaucaucaaggaggagguccuggccuacguggugcagcugccccucuacggggucaucgacacccccugcuggaagcugcacaccagcccccugugcacgaccaacaccaaggagggcuccaacaucugccucacccggacggaccgcgggugguacugcgacaacgccggcagcguguccuucuucccgcaggccgagaccugcaagguccagagcaaccggguguucugcgacaccaugaacucccugacccugcccagcgaggugaaccucugcaacaucgacaucuucaaccccaaguacgacugcaagaucaugacguccaagaccgacgucagcuccagcgugaucaccucccugggcgccaucgugagcugcuacgggaagaccaagugcacggcgagcaacaagaaccgcggcaucaucaagaccuucuccaacgggugcgacuacgucagcaacaagggcguggacaccguguccgucggcaacacccuguacugcgugaacaagcaggagggccagagccucuacgugaagggggagcccaucaucaacuucuacgacccgcuggucuuccccuccgacgaguucgacgccagcaucucccaggugaacgagaagaucaaccagagccuggccuucauccggaaguccgacgagcuccugcacaacgugaacgucggcaagagcaccacgaacaucaugaucaccaccaucaucaucgugaucaucgugauccugcugcuccugaucgccgucgggcuguuccucuacugcaaggcccgcuccacccccgugacgcugagcaaggaccagcuguccgggaucaacaacaucgcguucagcaacugaggacuagucccuguucccagagcccacuuuuuuuucuuuuuuugaaauaaaauagccugucuuucagaucuaaaaaaaaaaaaaaaaaaaaaaaaaaaaaaaaaaaaaaaaaaaaaaaaaaaaaaaaaaaaaaaaaaaaaaaaaaaaaaaaaaaaaaaaaaaaaaaaaaaa

SEQ ID NO: 21664 - RNA, 1856 nt, Artificial Sequence
  mRNA product Design a-1 (A100) comprising derived and/or modified sequence from HRSV(Memphis-37)__AIY60640.1__F_DSCav1_mut3 (opt1)
aggagagucccgcagucggcguccagcggcucugcuuguucgugugugugucguugcaggccuuauucaagcuuaccauggagcugcccauccucaagaccaacgccaucaccacgauccuggccgcggugacccugugcuucgccagcucccagaacaucaccgaggaguucuaccagagcacgugcuccgccgucagcaagggcuaccucggggcccugcgcaccggcugguacaccuccgugaucaccaucgagcugagcaacaucaaggagaucaagugcaacgggaccgacgccaaggugaagcucaucaagcaggagcuggacaaguacaagaacgcggucacggaccugcagcuccugaugcaguccaccccggccgccggcagcggguccgccaucugcagcggcaucgcggugugcaaggugcugcaccucgagggcgaggucaacaagaucaagaacgcccugcuguccaccaacaaggccguggugagccucuccaacggggucagcgugcugaccuucaaggugcuggaccucaagaacuacaucgacaagcagcugcugcccauccucaacaagcaguccugcagcauccccaacaucgagacggucaucgaguuccagcagaagaacaaccggcugcuggagaucacccgcgaguucuccgugaacgccggcgugaccacccccgucagcacguacaugcucaccaacuccgagcugcugagccucaucaacgacaugccgaucaccaacgaccagaagaagcugaugagcaacaacgugcagaucgugcggcagcaguccuacagcaucaugugcaucaucaaggaggagguccuggccuacguggugcagcucccccuguacggggucaucgacacccccugcuggaagcugcacacgagcccccucugcaccaccaacaccaaggagggcuccaacaucugccugacgcgcaccgaccgggggugguacugcgacaacgcgggcuccgugagcuucuucccgcaggccgagaccugcaaggugcaguccaaccgcgucuucugcgacaccaugaacagccugacgcuccccuccgaggugaaccugugcaacaucgacaucuucaaccccaaguacgacugcaagaucaugaccagcaagaccgacgucuccagcuccgugaucaccagccugggcgccaucguguccugcuacgggaagacgaagugcaccgccagcaacaagaaccggggcaucaucaagaccuucuccaacgggugcgacuacgucagcaacaagggcguggacaccguguccgucggcaacacgcucuacugcgugaacaagcaggaggggcagagccuguacgugaagggcgagcccaucaucaacuucuacgacccgcuggucuuccccagcgacgaguucgacgccuccaucagccaggugaacgagaagaucaaccagucccucgcguucauccgcaagagcgacgagcugcugcacaacgugaacgucgggaaguccaccaccaacaucaugaucaccaccaucaucaucgugaucaucgugauccuccugcugcucaucgccgucggccuguuccuguacugcaaggcccggagcacgcccgugacccuguccaaggaccagcucagcgggaucaacaacaucgccuucuccaacugaggacuagucccuguucccagagcccacuuuuuuuucuuuuuuugaaauaaaauagccugucuuucagaucuaaaaaaaaaaaaaaaaaaaaaaaaaaaaaaaaaaaaaaaaaaaaaaaaaaaaaaaaaaaaaaaaaaaaaaaaaaaaaaaaaaaaaaaaaaaaaaaaaaaa

SEQ ID NO: 21665 - RNA, 1856 nt, Artificial Sequence
  mRNA product Design a-1 (A100) comprising derived and/or modified sequence from HRSV(Memphis-37)__AIY60640.1__F_DSCav1_mut3 (opt1)
aggagagucccgcagucggcguccagcggcucugcuuguucgugugugugucguugcaggccuuauucaagcuuaccauggagcugcccauccucaagaccaacgccaucaccacgauccuggccgcggugacccugugcuucgccagcucccagaacaucaccgaggaguucuaccagagcacgugcuccgccgucagcaagggcuaccucggggcccugcgcaccggcugguacaccuccgugaucaccaucgagcugagcaacaucaaggagaucaagugcaacgggaccgacgccaaggugaagcucaucaagcaggagcuggacaaguacaagaacgcggucacggaccugcagcuccugaugcaguccaccccggccgccggcagcggguccgccaucugcagcggcaucgcggugugcaaggugcugcaccucgagggcgaggucaacaagaucaagaacgcccugcuguccaccaacaaggccguggugagccucuccaacggggucagcgugcugaccuucaaggugcuggaccucaagaacuacaucgacaagcagcugcugcccauccucaacaagcaguccugcagcauccccaacaucgagacggucaucgaguuccagcagaagaacaaccggcugcuggagaucacccgcgaguucuccgugaacgccggcgugaccacccccgucagcacguacaugcucaccaacuccgagcugcugagccucaucaacgacaugccgaucaccaacgaccagaagaagcugaugagcaacaacgugcagaucgugcggcagcaguccuacagcaucaugugcaucaucaaggaggagguccuggccuacguggugcagcucccccuguacggggucaucgacacccccugcuggaagcugcacacgagcccccucugcaccaccaacaccaaggagggcuccaacaucugccugacgcgcaccgaccgggggugguacugcgacaacgcgggcuccgugagcuucuucccgcaggccgagaccugcaaggugcaguccaaccgcgucuucugcgacaccaugaacagccugacgcuccccuccgaggugaaccugugcaacaucgacaucuucaaccccaaguacgacugcaagaucaugaccagcaagaccgacgucuccagcuccgugaucaccagccugggcgccaucguguccugcuacgggaagacgaagugcaccgccagcaacaagaaccggggcaucaucaagaccuucuccaacgggugcgacuacgucagcaacaagggcguggacaccguguccgucggcaacacgcucuacugcgugaacaagcaggaggggcagagccuguacgugaagggcgagcccaucaucaacuucuacgacccgcuggucuuccccagcgacgaguucgacgccuccaucagccaggugaacgagaagaucaaccagucccucgcguucauccgcaagagcgacgagcugcugcacaacgugaacgucgggaaguccaccaccaacaucaugaucaccaccaucaucaucgugaucaucgugauccuccugcugcugaucgccgucggccucuuccuguacugcaaggcccggagcacgcccgugacccuguccaaggaccagcucagcgggaucaacaacaucgccuucuccaacugaggacuagucccuguucccagagcccacuuuuuuuucuuuuuuugaaauaaaauagccugucuuucagaucuaaaaaaaaaaaaaaaaaaaaaaaaaaaaaaaaaaaaaaaaaaaaaaaaaaaaaaaaaaaaaaaaaaaaaaaaaaaaaaaaaaaaaaaaaaaaaaaaaaaa

SEQ ID NO: 21666 - RNA, 1793 nt, Artificial Sequence
  mRNA product Design a-1 (A100) comprising derived and/or modified sequence from HRSV(Memphis-37)__AIY60640.1__F-del_DSCav1_mut3 (opt1)
aggagagucccgcagucggcguccagcggcucugcuuguucgugugugugucguugcaggccuuauucaagcuuaccauggagcugcccauccucaagaccaacgccaucaccacgauccuggccgcggugacccugugcuucgccagcucccagaacaucaccgaggaguucuaccagagcacgugcuccgccgucagcaagggcuaccucggcgcccugcgcaccgggugguacaccagcgugaucaccaucgagcuguccaacaucaaggagaucaagugcaacggcaccgacgccaaggugaagcucaucaagcaggagcuggacaaguacaagaacgcggucacggaccugcagcuccugaugcagagcaccccggccgccggcuccgggagcgcgaucugcuccggcaucgccgucugcaaggugcugcaccucgagggcgaggugaacaagaucaagaacgcccugcuguccaccaacaaggccgucgugagccucuccaacggggugagcguccugaccuucaaggugcuggaccucaagaacuacaucgacaagcagcugcugcccauccugaacaagcagagcugcuccauccccaacaucgagaccgucaucgaguuccagcagaagaacaaccgccuccuggagaucacgcgggaguucagcgugaacgcgggcgugaccacccccgucuccaccuacaugcugacgaacagcgagcuccugucccugaucaacgacaugccgaucaccaacgaccagaagaagcucaugagcaacaacgugcagaucgugcgccagcaguccuacagcaucaugugcaucaucaaggaggagguccuggccuacguggugcagcugccccucuacggggucaucgacacccccugcuggaagcugcacaccagcccccugugcacgaccaacaccaaggagggcuccaacaucugccucacccggacggaccgcgggugguacugcgacaacgccggcagcguguccuucuucccgcaggccgagaccugcaagguccagagcaaccggguguucugcgacaccaugaacucccugacccugcccagcgaggugaaccucugcaacaucgacaucuucaaccccaaguacgacugcaagaucaugacguccaagaccgacgucagcuccagcgugaucaccucccugggcgccaucgugagcugcuacgggaagaccaagugcacggcgagcaacaagaaccgcggcaucaucaagaccuucuccaacgggugcgacuacgucagcaacaagggcguggacaccguguccgucggcaacacccuguacugcgugaacaagcaggagggccagagccucuacgugaagggggagcccaucaucaacuucuacgacccgcuggucuuccccuccgacgaguucgacgccagcaucucccaggugaacgagaagaucaaccagagccuggccuucauccggaaguccgacgagcuccugcacaacgugaacgucggcaagagcaccacgaacaucaugaucaccaccaucaucaucgugaucaucgugauccugcugcuccugaucgccgucgggcuguuccucuacugcaaggcccgcugaggacuagucccuguucccagagcccacuuuuuuuucuuuuuuugaaauaaaauagccugucuuucagaucuaaaaaaaaaaaaaaaaaaaaaaaaaaaaaaaaaaaaaaaaaaaaaaaaaaaaaaaaaaaaaaaaaaaaaaaaaaaaaaaaaaaaaaaaaaaaaaaaaaaa

SEQ ID NO: 21667 - RNA, 1793 nt, Artificial Sequence
  mRNA product Design a-1 (A100) comprising derived and/or modified sequence from HRSV(Memphis-37)__AIY60640.1__F-del_DSCav1_mut3 (opt1)
aggagagucccgcagucggcguccagcggcucugcuuguucgugugugugucguugcaggccuuauucaagcuuaccauggagcugcccauccucaagaccaacgccaucaccacgauccuggccgcggugacccugugcuucgccagcucccagaacaucaccgaggaguucuaccagagcacgugcuccgccgucagcaagggcuaccucggggcccugcgcaccggcugguacaccuccgugaucaccaucgagcugagcaacaucaaggagaucaagugcaacgggaccgacgccaaggugaagcucaucaagcaggagcuggacaaguacaagaacgcggucacggaccugcagcuccugaugcaguccaccccggccgccggcagcggguccgccaucugcagcggcaucgcggugugcaaggugcugcaccucgagggcgaggucaacaagaucaagaacgcccugcuguccaccaacaaggccguggugagccucuccaacggggucagcgugcugaccuucaaggugcuggaccucaagaacuacaucgacaagcagcugcugcccauccucaacaagcaguccugcagcauccccaacaucgagacggucaucgaguuccagcagaagaacaaccggcugcuggagaucacccgcgaguucuccgugaacgccggcgugaccacccccgucagcacguacaugcucaccaacuccgagcugcugagccucaucaacgacaugccgaucaccaacgaccagaagaagcugaugagcaacaacgugcagaucgugcggcagcaguccuacagcaucaugugcaucaucaaggaggagguccuggccuacguggugcagcucccccuguacggggucaucgacacccccugcuggaagcugcacacgagcccccucugcaccaccaacaccaaggagggcuccaacaucugccugacgcgcaccgaccgggggugguacugcgacaacgcgggcuccgugagcuucuucccgcaggccgagaccugcaaggugcaguccaaccgcgucuucugcgacaccaugaacagccugacgcuccccuccgaggugaaccugugcaacaucgacaucuucaaccccaaguacgacugcaagaucaugaccagcaagaccgacgucuccagcuccgugaucaccagccugggcgccaucguguccugcuacgggaagacgaagugcaccgccagcaacaagaaccggggcaucaucaagaccuucuccaacgggugcgacuacgucagcaacaagggcguggacaccguguccgucggcaacacgcucuacugcgugaacaagcaggaggggcagagccuguacgugaagggcgagcccaucaucaacuucuacgacccgcuggucuuccccagcgacgaguucgacgccuccaucagccaggugaacgagaagaucaaccagucccucgcguucauccgcaagagcgacgagcugcugcacaacgugaacgucgggaaguccaccaccaacaucaugaucaccaccaucaucaucgugaucaucgugauccuccugcugcucaucgccgucggccuguuccuguacugcaaggcccggugaggacuagucccuguucccagagcccacuuuuuuuucuuuuuuugaaauaaaauagccugucuuucagaucuaaaaaaaaaaaaaaaaaaaaaaaaaaaaaaaaaaaaaaaaaaaaaaaaaaaaaaaaaaaaaaaaaaaaaaaaaaaaaaaaaaaaaaaaaaaaaaaaaaaa

SEQ ID NO: 21668 - RNA, 1793 nt, Artificial Sequence
  mRNA product Design a-1 (A100) comprising derived and/or modified sequence from HRSV(Memphis-37)__AIY60640.1__F-del_DSCav1_mut3 (opt1)
aggagagucccgcagucggcguccagcggcucugcuuguucgugugugugucguugcaggccuuauucaagcuuaccauggagcugcccauccucaagaccaacgccaucaccacgauccuggccgcggugacccugugcuucgccagcucccagaacaucaccgaggaguucuaccagagcacgugcuccgccgucagcaagggcuaccucggggcccugcgcaccggcugguacaccuccgugaucaccaucgagcugagcaacaucaaggagaucaagugcaacgggaccgacgccaaggugaagcucaucaagcaggagcuggacaaguacaagaacgcggucacggaccugcagcuccugaugcaguccaccccggccgccggcagcggguccgccaucugcagcggcaucgcggugugcaaggugcugcaccucgagggcgaggucaacaagaucaagaacgcccugcuguccaccaacaaggccguggugagccucuccaacggggucagcgugcugaccuucaaggugcuggaccucaagaacuacaucgacaagcagcugcugcccauccucaacaagcaguccugcagcauccccaacaucgagacggucaucgaguuccagcagaagaacaaccggcugcuggagaucacccgcgaguucuccgugaacgccggcgugaccacccccgucagcacguacaugcucaccaacuccgagcugcugagccucaucaacgacaugccgaucaccaacgaccagaagaagcugaugagcaacaacgugcagaucgugcggcagcaguccuacagcaucaugugcaucaucaaggaggagguccuggccuacguggugcagcucccccuguacggggucaucgacacccccugcuggaagcugcacacgagcccccucugcaccaccaacaccaaggagggcuccaacaucugccugacgcgcaccgaccgggggugguacugcgacaacgcgggcuccgugagcuucuucccgcaggccgagaccugcaaggugcaguccaaccgcgucuucugcgacaccaugaacagccugacgcuccccuccgaggugaaccugugcaacaucgacaucuucaaccccaaguacgacugcaagaucaugaccagcaagaccgacgucuccagcuccgugaucaccagccugggcgccaucguguccugcuacgggaagacgaagugcaccgccagcaacaagaaccggggcaucaucaagaccuucuccaacgggugcgacuacgucagcaacaagggcguggacaccguguccgucggcaacacgcucuacugcgugaacaagcaggaggggcagagccuguacgugaagggcgagcccaucaucaacuucuacgacccgcuggucuuccccagcgacgaguucgacgccuccaucagccaggugaacgagaagaucaaccagucccucgcguucauccgcaagagcgacgagcugcugcacaacgugaacgucgggaaguccaccaccaacaucaugaucaccaccaucaucaucgugaucaucgugauccuccugcugcugaucgccgucggccucuuccuguacugcaaggcccggugaggacuagucccuguucccagagcccacuuuuuuuucuuuuuuugaaauaaaauagccugucuuucagaucuaaaaaaaaaaaaaaaaaaaaaaaaaaaaaaaaaaaaaaaaaaaaaaaaaaaaaaaaaaaaaaaaaaaaaaaaaaaaaaaaaaaaaaaaaaaaaaaaaaaa

SEQ ID NO: 21669 - RNA, 1856 nt, Artificial Sequence
  mRNA product Design a-1 (A100) comprising derived and/or modified sequence from HRSV(Memphis-37)__AIY60640.1__F_DSCav1_mut4 (opt1)
aggagagucccgcagucggcguccagcggcucugcuuguucgugugugugucguugcaggccuuauucaagcuuaccauggagcugcccauccucaagaccaacgccaucaccacgauccuggccgcggugacccugugcuucgccagcucccagaacaucaccgaggaguucuaccagagcacgugcuccgccgucagcaagggcuaccucuccgcccugcgcaccgggugguacaccagcgugaucaccaucgagcuguccaacaucaaggagaacaagugcaacggcaccgacgccaaggugaagcucaucaagcaggagcuggacaaguacaagaacgcggucacggagcugcagcuccugaugcagagcaccccggccgccggcuccgggagcgcgaucugcuccggcaucgccgucugcaaggugcugcaccucgagggcgaggugaacaagaucaagaacgcccugcuguccaccaacaaggccgucgugagccucuccaacggggugagcguccugaccuucaaggugcuggaccucaagaacuacaucgacaagcagcugcugcccauccugaacaagcagagcugcuccaucagcaacaucgagaccgucaucgaguuccagcagaagaacaaccgccuccuggagaucacgcgggaguucagcgugaacgcgggcgugaccacccccgucuccaccuacaugcugacgaacagcgagcuccugucccugaucaacgacaugccgaucaccaacgaccagaagaagcucaugagcaacaacgugcagaucgugcgccagcaguccuacagcaucaugugcaucaucaaggaggagguccuggccuacguggugcagcugccccucuacggggucaucgacacccccugcuggaagcugcacaccagcccccugugcacgaccaacaccaaggagggcuccaacaucugccucacccggacggaccgcgggugguacugcgacaacgccggcagcguguccuucuucccgcaggccgagaccugcaagguccagagcaaccggguguucugcgacaccaugaacucccggacccugcccagcgaggugaaccucugcaacaucgacaucuucaaccccaaguacgacugcaagaucaugacguccaagaccgacgucagcuccagcgugaucaccucccugggcgccaucgugagcugcuacgggaagaccaagugcacggcgagcaacaagaaccgcggcaucaucaagaccuucuccaacgggugcgacuacgucagcaacaagggcguggacaccguguccgucggcaacacccuguacugcgugaacaagcaggagggcaagagccucuacgugaagggggagcccaucaucaacuucuacgacccgcuggucuuccccuccgacgaguucgacgccagcaucucccaggugaacgagaagaucaaccagagccuggccuucauccggaaguccgacgagcuccugcacaacgugaacgucggcaagagcaccacgaacaucaugaucaccaccaucaucaucgugaucaucgugauccugcugcuccugaucgccgucgggcuguuccucuacugcaaggcccgcuccacccccgugacgcugagcaaggaccagcuguccgggaucaacaacaucgcguucagcaacugaggacuagucccuguucccagagcccacuuuuuuuucuuuuuuugaaauaaaauagccugucuuucagaucuaaaaaaaaaaaaaaaaaaaaaaaaaaaaaaaaaaaaaaaaaaaaaaaaaaaaaaaaaaaaaaaaaaaaaaaaaaaaaaaaaaaaaaaaaaaaaaaaaaaa

SEQ ID NO: 21670 - RNA, 1856 nt, Artificial Sequence
  mRNA product Design a-1 (A100) comprising derived and/or modified sequence from HRSV(Memphis-37)__AIY60640.1__F_DSCav1_mut4 (opt1)
aggagagucccgcagucggcguccagcggcucugcuuguucgugugugugucguugcaggccuuauucaagcuuaccauggagcugcccauccucaagaccaacgccaucaccacgauccuggccgcggugacccugugcuucgccagcucccagaacaucaccgaggaguucuaccagagcacgugcuccgccgucagcaagggcuaccucuccgcccugcgcaccgggugguacaccagcgugaucaccaucgagcuguccaacaucaaggagaacaagugcaacggcaccgacgccaaggugaagcucaucaagcaggagcuggacaaguacaagaacgcggucacggagcugcagcuccugaugcagagcaccccggccgccggguccggcagcgccaucugcuccgggaucgcggugugcaaggugcugcaccucgagggcgaggucaacaagaucaagaacgcccugcugagcaccaacaaggccguggugucccucagcaacggcgucuccgugcugaccuucaaggugcuggaccucaagaacuacaucgacaagcagcugcugcccauccucaacaagcagagcugcuccaucagcaacaucgagacggucaucgaguuccagcagaagaacaaccggcugcuggagaucacccgcgaguucuccgugaacgccggggugaccacccccgucagcacguacaugcucaccaacagcgagcugcugucccucaucaacgacaugcccaucaccaacgaccagaagaagcugaugagcaacaacgugcagaucgugcggcagcaguccuacagcaucaugugcaucaucaaggaggagguccuggccuacguggugcagcucccgcuguacggcgucaucgacacccccugcuggaagcugcacacgagcccccucugcaccaccaacaccaaggagggguccaacaucugccugacgcgcaccgaccggggcugguacugcgacaacgcgggguccgugagcuucuucccccaggccgagaccugcaaggugcaguccaaccgcgucuucugcgacaccaugaacagccggacgcucccguccgaggugaaccugugcaacaucgacaucuucaaccccaaguacgacugcaagaucaugaccagcaagaccgacgucuccagcuccgugaucaccagccugggcgccaucguguccugcuacggcaagacgaagugcaccgccagcaacaagaaccgggggaucaucaagaccuucuccaacggcugcgacuacgucagcaacaaggggguggacaccgugagcgucggcaacacgcucuacugcgugaacaagcaggagggcaagucccuguacgugaagggggagcccaucaucaacuucuacgacccccuggucuucccgagcgacgaguucgacgccuccaucagccaggugaacgagaagaucaaccagucccucgcguucauccgcaagagcgacgagcugcugcacaacgugaacgucggcaaguccaccaccaacaucaugaucaccaccaucaucaucgugaucaucgugauccuccugcugcucaucgccgucgggcuguuccuguacugcaaggcccggagcacgcccgugacccuguccaaggaccagcucagcggcaucaacaacaucgccuucuccaacugaggacuagucccuguucccagagcccacuuuuuuuucuuuuuuugaaauaaaauagccugucuuucagaucuaaaaaaaaaaaaaaaaaaaaaaaaaaaaaaaaaaaaaaaaaaaaaaaaaaaaaaaaaaaaaaaaaaaaaaaaaaaaaaaaaaaaaaaaaaaaaaaaaaaa

SEQ ID NO: 21671 - RNA, 1856 nt, Artificial Sequence
  mRNA product Design a-1 (A100) comprising derived and/or modified sequence from HRSV(Memphis-37)__AIY60640.1__F_DSCav1_mut4 (opt1)
aggagagucccgcagucggcguccagcggcucugcuuguucgugugugugucguugcaggccuuauucaagcuuaccauggagcugcccauccucaagaccaacgccaucaccacgauccuggccgcggugacccugugcuucgccagcucccagaacaucaccgaggaguucuaccagagcacgugcuccgccgucagcaagggcuaccucuccgcccugcgcaccgggugguacaccagcgugaucaccaucgagcuguccaacaucaaggagaacaagugcaacggcaccgacgccaaggugaagcucaucaagcaggagcuggacaaguacaagaacgcggucacggagcugcagcuccugaugcagagcaccccggccgccggguccggcagcgccaucugcuccgggaucgcggugugcaaggugcugcaccucgagggcgaggucaacaagaucaagaacgcccugcugagcaccaacaaggccguggugucccucagcaacggcgucuccgugcugaccuucaaggugcuggaccucaagaacuacaucgacaagcagcugcugcccauccucaacaagcagagcugcuccaucagcaacaucgagacggucaucgaguuccagcagaagaacaaccggcugcuggagaucacccgcgaguucuccgugaacgccggggugaccacccccgucagcacguacaugcucaccaacagcgagcugcugucccucaucaacgacaugcccaucaccaacgaccagaagaagcugaugagcaacaacgugcagaucgugcggcagcaguccuacagcaucaugugcaucaucaaggaggagguccuggccuacguggugcagcucccgcuguacggcgucaucgacacccccugcuggaagcugcacacgagcccccucugcaccaccaacaccaaggaggggagcaacaucugccugacgcgcaccgaccggggcugguacugcgacaacgcgggguccgugagcuucuucccccaggccgagaccugcaaggugcaguccaaccgcgucuucugcgacaccaugaacagccggacgcugccguccgaggugaaccucugcaacaucgacaucuucaaccccaaguacgacugcaagaucaugaccagcaagaccgacgucuccagcuccgugaucaccagccugggcgccaucguguccugcuacggcaagacgaagugcaccgccagcaacaagaaccgcgggaucaucaagaccuucuccaacggcugcgacuacgucagcaacaaggggguggacaccgugagcgucggcaacacgcuguacugcgugaacaagcaggagggcaagucccucuacgugaagggggagcccaucaucaacuucuacgacccccuggucuucccgagcgacgaguucgacgccuccaucagccaggugaacgagaagaucaaccagucccuggcguucauccggaaguccgacgagcuccugcacaacgugaacgucggcaaguccaccaccaacaucaugaucaccaccaucaucaucgugaucaucgugauccugcuccugcugaucgccgucgggcuguuccucuacugcaaggcccgcagcacgcccgugacccuguccaaggaccagcugagcggcaucaacaacaucgccuucuccaacugaggacuagucccuguucccagagcccacuuuuuuuucuuuuuuugaaauaaaauagccugucuuucagaucuaaaaaaaaaaaaaaaaaaaaaaaaaaaaaaaaaaaaaaaaaaaaaaaaaaaaaaaaaaaaaaaaaaaaaaaaaaaaaaaaaaaaaaaaaaaaaaaaaaaa

SEQ ID NO: 21672 - RNA, 1793 nt, Artificial Sequence
  mRNA product Design a-1 (A100) comprising derived and/or modified sequence from HRSV(Memphis-37)__AIY60640.1__F-del_DSCav1_mut4 (opt1)
aggagagucccgcagucggcguccagcggcucugcuuguucgugugugugucguugcaggccuuauucaagcuuaccauggagcugcccauccucaagaccaacgccaucaccacgauccuggccgcggugacccugugcuucgccagcucccagaacaucaccgaggaguucuaccagagcacgugcuccgccgucagcaagggcuaccucuccgcccugcgcaccgggugguacaccagcgugaucaccaucgagcuguccaacaucaaggagaacaagugcaacggcaccgacgccaaggugaagcucaucaagcaggagcuggacaaguacaagaacgcggucacggagcugcagcuccugaugcagagcaccccggccgccggcuccgggagcgcgaucugcuccggcaucgccgucugcaaggugcugcaccucgagggcgaggugaacaagaucaagaacgcccugcuguccaccaacaaggccgucgugagccucuccaacggggugagcguccugaccuucaaggugcuggaccucaagaacuacaucgacaagcagcugcugcccauccugaacaagcagagcugcuccaucagcaacaucgagaccgucaucgaguuccagcagaagaacaaccgccuccuggagaucacgcgggaguucagcgugaacgcgggcgugaccacccccgucuccaccuacaugcugacgaacagcgagcuccugucccugaucaacgacaugccgaucaccaacgaccagaagaagcucaugagcaacaacgugcagaucgugcgccagcaguccuacagcaucaugugcaucaucaaggaggagguccuggccuacguggugcagcugccccucuacggggucaucgacacccccugcuggaagcugcacaccagcccccugugcacgaccaacaccaaggagggcuccaacaucugccucacccggacggaccgcgggugguacugcgacaacgccggcagcguguccuucuucccgcaggccgagaccugcaagguccagagcaaccggguguucugcgacaccaugaacucccggacccugcccagcgaggugaaccucugcaacaucgacaucuucaaccccaaguacgacugcaagaucaugacguccaagaccgacgucagcuccagcgugaucaccucccugggcgccaucgugagcugcuacgggaagaccaagugcacggcgagcaacaagaaccgcggcaucaucaagaccuucuccaacgggugcgacuacgucagcaacaagggcguggacaccguguccgucggcaacacccuguacugcgugaacaagcaggagggcaagagccucuacgugaagggggagcccaucaucaacuucuacgacccgcuggucuuccccuccgacgaguucgacgccagcaucucccaggugaacgagaagaucaaccagagccuggccuucauccggaaguccgacgagcuccugcacaacgugaacgucggcaagagcaccacgaacaucaugaucaccaccaucaucaucgugaucaucgugauccugcugcuccugaucgccgucgggcuguuccucuacugcaaggcccgcugaggacuagucccuguucccagagcccacuuuuuuuucuuuuuuugaaauaaaauagccugucuuucagaucuaaaaaaaaaaaaaaaaaaaaaaaaaaaaaaaaaaaaaaaaaaaaaaaaaaaaaaaaaaaaaaaaaaaaaaaaaaaaaaaaaaaaaaaaaaaaaaaaaaaa

SEQ ID NO: 21673 - RNA, 1793 nt, Artificial Sequence
  mRNA product Design a-1 (A100) comprising derived and/or modified sequence from HRSV(Memphis-37)__AIY60640.1__F-del_DSCav1_mut4 (opt1)
aggagagucccgcagucggcguccagcggcucugcuuguucgugugugugucguugcaggccuuauucaagcuuaccauggagcugcccauccucaagaccaacgccaucaccacgauccuggccgcggugacccugugcuucgccagcucccagaacaucaccgaggaguucuaccagagcacgugcuccgccgucagcaagggcuaccucuccgcccugcgcaccgggugguacaccagcgugaucaccaucgagcuguccaacaucaaggagaacaagugcaacggcaccgacgccaaggugaagcucaucaagcaggagcuggacaaguacaagaacgcggucacggagcugcagcuccugaugcagagcaccccggccgccggguccggcagcgccaucugcuccgggaucgcggugugcaaggugcugcaccucgagggcgaggucaacaagaucaagaacgcccugcugagcaccaacaaggccguggugucccucagcaacggcgucuccgugcugaccuucaaggugcuggaccucaagaacuacaucgacaagcagcugcugcccauccucaacaagcagagcugcuccaucagcaacaucgagacggucaucgaguuccagcagaagaacaaccggcugcuggagaucacccgcgaguucuccgugaacgccggggugaccacccccgucagcacguacaugcucaccaacagcgagcugcugucccucaucaacgacaugcccaucaccaacgaccagaagaagcugaugagcaacaacgugcagaucgugcggcagcaguccuacagcaucaugugcaucaucaaggaggagguccuggccuacguggugcagcucccgcuguacggcgucaucgacacccccugcuggaagcugcacacgagcccccucugcaccaccaacaccaaggagggguccaacaucugccugacgcgcaccgaccggggcugguacugcgacaacgcgggguccgugagcuucuucccccaggccgagaccugcaaggugcaguccaaccgcgucuucugcgacaccaugaacagccggacgcucccguccgaggugaaccugugcaacaucgacaucuucaaccccaaguacgacugcaagaucaugaccagcaagaccgacgucuccagcuccgugaucaccagccugggcgccaucguguccugcuacggcaagacgaagugcaccgccagcaacaagaaccgggggaucaucaagaccuucuccaacggcugcgacuacgucagcaacaaggggguggacaccgugagcgucggcaacacgcucuacugcgugaacaagcaggagggcaagucccuguacgugaagggggagcccaucaucaacuucuacgacccccuggucuucccgagcgacgaguucgacgccuccaucagccaggugaacgagaagaucaaccagucccucgcguucauccgcaagagcgacgagcugcugcacaacgugaacgucggcaaguccaccaccaacaucaugaucaccaccaucaucaucgugaucaucgugauccuccugcugcucaucgccgucgggcuguuccuguacugcaaggcccggugaggacuagucccuguucccagagcccacuuuuuuuucuuuuuuugaaauaaaauagccugucuuucagaucuaaaaaaaaaaaaaaaaaaaaaaaaaaaaaaaaaaaaaaaaaaaaaaaaaaaaaaaaaaaaaaaaaaaaaaaaaaaaaaaaaaaaaaaaaaaaaaaaaaaa

SEQ ID NO: 21674 - RNA, 1793 nt, Artificial Sequence
  mRNA product Design a-1 (A100) comprising derived and/or modified sequence from HRSV(Memphis-37)__AIY60640.1__F-del_DSCav1_mut4 (opt1)
aggagagucccgcagucggcguccagcggcucugcuuguucgugugugugucguugcaggccuuauucaagcuuaccauggagcugcccauccucaagaccaacgccaucaccacgauccuggccgcggugacccugugcuucgccagcucccagaacaucaccgaggaguucuaccagagcacgugcuccgccgucagcaagggcuaccucuccgcccugcgcaccgggugguacaccagcgugaucaccaucgagcuguccaacaucaaggagaacaagugcaacggcaccgacgccaaggugaagcucaucaagcaggagcuggacaaguacaagaacgcggucacggagcugcagcuccugaugcagagcaccccggccgccggguccggcagcgccaucugcuccgggaucgcggugugcaaggugcugcaccucgagggcgaggucaacaagaucaagaacgcccugcugagcaccaacaaggccguggugucccucagcaacggcgucuccgugcugaccuucaaggugcuggaccucaagaacuacaucgacaagcagcugcugcccauccucaacaagcagagcugcuccaucagcaacaucgagacggucaucgaguuccagcagaagaacaaccggcugcuggagaucacccgcgaguucuccgugaacgccggggugaccacccccgucagcacguacaugcucaccaacagcgagcugcugucccucaucaacgacaugcccaucaccaacgaccagaagaagcugaugagcaacaacgugcagaucgugcggcagcaguccuacagcaucaugugcaucaucaaggaggagguccuggccuacguggugcagcucccgcuguacggcgucaucgacacccccugcuggaagcugcacacgagcccccucugcaccaccaacaccaaggaggggagcaacaucugccugacgcgcaccgaccggggcugguacugcgacaacgcgggguccgugagcuucuucccccaggccgagaccugcaaggugcaguccaaccgcgucuucugcgacaccaugaacagccggacgcugccguccgaggugaaccucugcaacaucgacaucuucaaccccaaguacgacugcaagaucaugaccagcaagaccgacgucuccagcuccgugaucaccagccugggcgccaucguguccugcuacggcaagacgaagugcaccgccagcaacaagaaccgcgggaucaucaagaccuucuccaacggcugcgacuacgucagcaacaaggggguggacaccgugagcgucggcaacacgcuguacugcgugaacaagcaggagggcaagucccucuacgugaagggggagcccaucaucaacuucuacgacccccuggucuucccgagcgacgaguucgacgccuccaucagccaggugaacgagaagaucaaccagucccuggcguucauccggaaguccgacgagcuccugcacaacgugaacgucggcaaguccaccaccaacaucaugaucaccaccaucaucaucgugaucaucgugauccugcuccugcugaucgccgucgggcuguuccucuacugcaaggcccgcugaggacuagucccuguucccagagcccacuuuuuuuucuuuuuuugaaauaaaauagccugucuuucagaucuaaaaaaaaaaaaaaaaaaaaaaaaaaaaaaaaaaaaaaaaaaaaaaaaaaaaaaaaaaaaaaaaaaaaaaaaaaaaaaaaaaaaaaaaaaaaaaaaaaaa

SEQ ID NO: 21675 - RNA, 1859 nt, Artificial Sequence
  mRNA product Design a-1 (A100) comprising derived and/or modified sequence from HRSV(Memphis-37)__AIY60640.1__F_DSCav1_mut5 (opt1)
aggagagucccgcagucggcguccagcggcucugcuuguucgugugugugucguugcaggccuuauucaagcuuaccauggagcugcccauccucaagaccaacgccaucaccacgauccuggccgcggugacccugugcuucgccagcucccagaacaucaccgaggaguucuaccagagcacgugcuccgccgucagcaagggcuaccucuccgcccugcgcaccgggugguacaccagcgugaucaccaucgagcuguccaacaucaaggagaacaagugcaacggcaccgacgccaaggugaagcucaucaagcaggagcuggacaaguacaagaacgcggucacggagcugcagcuccugaugcagagcaccccggccgccggcuccgggagcgcgaucgccuccggcaucgccgucugcaaggugcugcaccucgagggcgaggugaacaagaucaagaacgcccugcuguccaccaacaaggccgucgugagccucuccggcugcggggugagcguccugaccuucaaggugcuggaccucaagaacuacaucgacaagcagcugcugcccauccugaacaagcagagcugcuccaucagcaacaucgagaccgucaucgaguuccagcagaagaacaaccgccuccuggagaucacgcgggaguucagcgugaacgcgggcgugaccacccccgucuccaccuacaugcugacgaacagcgagcuccugucccugaucaacgacaugccgaucaccaacgaccagaagaagcucaugagcaacaacgugcagaucgugcgccagcaguccuacagcaucaugugcaucaucaaggaggagguccuggccuacguggugcagcugccccucuacggggucaucgacacccccugcuggaagcugcacaccagcccccugugcacgaccaacaccaaggagggcuccaacaucugccucacccggacggaccgcgggugguacugcgacaacgccggcagcguguccuucuucccgcaggccgagaccugcaagguccagagcaaccggguguucugcgacaccaugaacucccggacccugcccagcgaggugaaccucugcaacaucgacaucuucaaccccaaguacgacugcaagaucaugacguccaagaccgacgucagcuccagcgugaucaccucccugggcgccaucgugagcugcuacgggaagaccaagugcacggcgagcaacaagugccgcggcaucaucaagaccuucuccaacgggugcgacuacgucagcaacaagggcguggacaccguguccgucggcaacacccuguacuacgugaacaagcaggagggcaagagccucuacgugaagggggagcccaucaucaacuucuacgacccgcuggucuuccccuccgacgaguucgacgccagcaucucccaggugaacgagaagaucaaccagagccuggccuucauccggaaguccgacgagcuccugcacaacgugaacgucggcaagagcaccacgaacaucaugaucaccaccaucaucaucgugaucaucgugauccugcugcuccugaucgccgucgggcuguuccucuacugcaaggcccgcuccacccccgugacgcugagcaaggaccagcuguccgggaucaacaacaucgcguucagcaacugaggacuagucccuguucccagagcccacuuuuuuuucuuuuuuugaaauaaaauagccugucuuucagaucuaaaaaaaaaaaaaaaaaaaaaaaaaaaaaaaaaaaaaaaaaaaaaaaaaaaaaaaaaaaaaaaaaaaaaaaaaaaaaaaaaaaaaaaaaaaaaaaaaaaa

SEQ ID NO: 21676 - RNA, 1859 nt, Artificial Sequence
  mRNA product Design a-1 (A100) comprising derived and/or modified sequence from HRSV(Memphis-37)__AIY60640.1__F_DSCav1_mut5 (opt1)
aggagagucccgcagucggcguccagcggcucugcuuguucgugugugugucguugcaggccuuauucaagcuuaccauggagcugcccauccucaagaccaacgccaucaccacgauccuggccgcggugacccugugcuucgccagcucccagaacaucaccgaggaguucuaccagagcacgugcuccgccgucagcaagggcuaccucuccgcccugcgcaccgggugguacaccagcgugaucaccaucgagcuguccaacaucaaggagaacaagugcaacggcaccgacgccaaggugaagcucaucaagcaggagcuggacaaguacaagaacgcggucacggagcugcagcuccugaugcagagcaccccggccgccggguccggcagcgccaucgcguccgggaucgccgugugcaaggugcugcaccucgagggcgaggucaacaagaucaagaacgcccugcugagcaccaacaaggccguggugucccucagcggcugcggggucuccgugcugaccuucaaggugcuggaccucaagaacuacaucgacaagcagcugcugcccauccucaacaagcagagcugcuccaucagcaacaucgagacggucaucgaguuccagcagaagaacaaccggcugcuggagaucacccgcgaguucuccgugaacgccggcgugaccacccccgucagcacguacaugcucaccaacagcgagcugcugucccucaucaacgacaugcccaucaccaacgaccagaagaagcugaugagcaacaacgugcagaucgugcggcagcaguccuacagcaucaugugcaucaucaaggaggagguccuggcguacguggugcagcucccgcuguacggggucaucgacacccccugcuggaagcugcacacgagcccccucugcaccaccaacaccaaggagggcuccaacaucugccugacgcgcaccgaccgggggugguacugcgacaacgccggcuccgugagcuucuucccccaggccgagaccugcaaggugcaguccaaccgcgucuucugcgacaccaugaacagccggacgcucccguccgaggugaaccugugcaacaucgacaucuucaaccccaaguacgacugcaagaucaugaccagcaagaccgacgucuccagcuccgugaucaccagccugggcgccaucguguccugcuacgggaagacgaagugcaccgccagcaacaagugccggggcaucaucaagaccuucuccaacgggugcgacuacgucagcaacaagggcguggacaccgugagcgucggcaacacgcucuacuacgugaacaagcaggaggggaagucccuguacgugaagggcgagcccaucaucaacuucuacgacccccuggucuucccgagcgacgaguucgacgcguccaucagccaggugaacgagaagaucaaccagucccucgccuucauccgcaagagcgacgagcugcugcacaacgugaacgucgggaaguccaccaccaacaucaugaucaccaccaucaucaucgugaucaucgugauccuccugcugcucaucgccgucggccuguuccuguacugcaaggcccggagcacgcccgugacccuguccaaggaccagcucagcgggaucaacaacaucgccuucuccaacugaggacuagucccuguucccagagcccacuuuuuuuucuuuuuuugaaauaaaauagccugucuuucagaucuaaaaaaaaaaaaaaaaaaaaaaaaaaaaaaaaaaaaaaaaaaaaaaaaaaaaaaaaaaaaaaaaaaaaaaaaaaaaaaaaaaaaaaaaaaaaaaaaaaaa

SEQ ID NO: 21677 - RNA, 1859 nt, Artificial Sequence
  mRNA product Design a-1 (A100) comprising derived and/or modified sequence from HRSV(Memphis-37)__AIY60640.1__F_DSCav1_mut5 (opt1)
aggagagucccgcagucggcguccagcggcucugcuuguucgugugugugucguugcaggccuuauucaagcuuaccauggagcugcccauccucaagaccaacgccaucaccacgauccuggccgcggugacccugugcuucgccagcucccagaacaucaccgaggaguucuaccagagcacgugcuccgccgucagcaagggcuaccucuccgcccugcgcaccgggugguacaccagcgugaucaccaucgagcuguccaacaucaaggagaacaagugcaacggcaccgacgccaaggugaagcucaucaagcaggagcuggacaaguacaagaacgcggucacggagcugcagcuccugaugcagagcaccccggccgccggguccggcagcgccaucgcguccgggaucgccgugugcaaggugcugcaccucgagggcgaggucaacaagaucaagaacgcccugcugagcaccaacaaggccguggugucccucagcggcugcggggucuccgugcugaccuucaaggugcuggaccucaagaacuacaucgacaagcagcugcugcccauccucaacaagcagagcugcuccaucagcaacaucgagacggucaucgaguuccagcagaagaacaaccggcugcuggagaucacccgcgaguucuccgugaacgccggcgugaccacccccgucagcacguacaugcucaccaacagcgagcugcugucccucaucaacgacaugcccaucaccaacgaccagaagaagcugaugagcaacaacgugcagaucgugcggcagcaguccuacagcaucaugugcaucaucaaggaggagguccuggcguacguggugcagcucccgcuguacggggucaucgacacccccugcuggaagcugcacacgagcccccucugcaccaccaacaccaaggagggcagcaacaucugccugacgcgcaccgaccgggggugguacugcgacaacgccggcuccgugagcuucuucccccaggccgagaccugcaaggugcaguccaaccgcgucuucugcgacaccaugaacagccggacgcugccguccgaggugaaccucugcaacaucgacaucuucaaccccaaguacgacugcaagaucaugaccagcaagaccgacgucuccagcuccgugaucaccagccugggcgccaucguguccugcuacgggaagacgaagugcaccgccagcaacaagugccgcggcaucaucaagaccuucuccaacgggugcgacuacgucagcaacaagggcguggacaccgugagcgucggcaacacgcuguacuacgugaacaagcaggaggggaagucccucuacgugaagggcgagcccaucaucaacuucuacgacccccuggucuucccgagcgacgaguucgacgcguccaucagccaggugaacgagaagaucaaccagucccuggccuucauccggaaguccgacgagcuccugcacaacgugaacgucgggaaguccaccaccaacaucaugaucaccaccaucaucaucgugaucaucgugauccugcuccugcugaucgccgucggccuguuccucuacugcaaggcccgcagcacgcccgugacccuguccaaggaccagcugagcgggaucaacaacaucgccuucuccaacugaggacuagucccuguucccagagcccacuuuuuuuucuuuuuuugaaauaaaauagccugucuuucagaucuaaaaaaaaaaaaaaaaaaaaaaaaaaaaaaaaaaaaaaaaaaaaaaaaaaaaaaaaaaaaaaaaaaaaaaaaaaaaaaaaaaaaaaaaaaaaaaaaaaaa

SEQ ID NO: 21678 - RNA, 1796 nt, Artificial Sequence
  mRNA product Design a-1 (A100) comprising derived and/or modified sequence from HRSV(Memphis-37)__AIY60640.1__F-del_DSCav1_mut5 (opt1)
aggagagucccgcagucggcguccagcggcucugcuuguucgugugugugucguugcaggccuuauucaagcuuaccauggagcugcccauccucaagaccaacgccaucaccacgauccuggccgcggugacccugugcuucgccagcucccagaacaucaccgaggaguucuaccagagcacgugcuccgccgucagcaagggcuaccucuccgcccugcgcaccgggugguacaccagcgugaucaccaucgagcuguccaacaucaaggagaacaagugcaacggcaccgacgccaaggugaagcucaucaagcaggagcuggacaaguacaagaacgcggucacggagcugcagcuccugaugcagagcaccccggccgccggcuccgggagcgcgaucgccuccggcaucgccgucugcaaggugcugcaccucgagggcgaggugaacaagaucaagaacgcccugcuguccaccaacaaggccgucgugagccucuccggcugcggggugagcguccugaccuucaaggugcuggaccucaagaacuacaucgacaagcagcugcugcccauccugaacaagcagagcugcuccaucagcaacaucgagaccgucaucgaguuccagcagaagaacaaccgccuccuggagaucacgcgggaguucagcgugaacgcgggcgugaccacccccgucuccaccuacaugcugacgaacagcgagcuccugucccugaucaacgacaugccgaucaccaacgaccagaagaagcucaugagcaacaacgugcagaucgugcgccagcaguccuacagcaucaugugcaucaucaaggaggagguccuggccuacguggugcagcugccccucuacggggucaucgacacccccugcuggaagcugcacaccagcccccugugcacgaccaacaccaaggagggcuccaacaucugccucacccggacggaccgcgggugguacugcgacaacgccggcagcguguccuucuucccgcaggccgagaccugcaagguccagagcaaccggguguucugcgacaccaugaacucccggacccugcccagcgaggugaaccucugcaacaucgacaucuucaaccccaaguacgacugcaagaucaugacguccaagaccgacgucagcuccagcgugaucaccucccugggcgccaucgugagcugcuacgggaagaccaagugcacggcgagcaacaagugccgcggcaucaucaagaccuucuccaacgggugcgacuacgucagcaacaagggcguggacaccguguccgucggcaacacccuguacuacgugaacaagcaggagggcaagagccucuacgugaagggggagcccaucaucaacuucuacgacccgcuggucuuccccuccgacgaguucgacgccagcaucucccaggugaacgagaagaucaaccagagccuggccuucauccggaaguccgacgagcuccugcacaacgugaacgucggcaagagcaccacgaacaucaugaucaccaccaucaucaucgugaucaucgugauccugcugcuccugaucgccgucgggcuguuccucuacugcaaggcccgcugaggacuagucccuguucccagagcccacuuuuuuuucuuuuuuugaaauaaaauagccugucuuucagaucuaaaaaaaaaaaaaaaaaaaaaaaaaaaaaaaaaaaaaaaaaaaaaaaaaaaaaaaaaaaaaaaaaaaaaaaaaaaaaaaaaaaaaaaaaaaaaaaaaaaa

SEQ ID NO: 21679 - RNA, 1796 nt, Artificial Sequence
  mRNA product Design a-1 (A100) comprising derived and/or modified sequence from HRSV(Memphis-37)__AIY60640.1__F-del_DSCav1_mut5 (opt1)
aggagagucccgcagucggcguccagcggcucugcuuguucgugugugugucguugcaggccuuauucaagcuuaccauggagcugcccauccucaagaccaacgccaucaccacgauccuggccgcggugacccugugcuucgccagcucccagaacaucaccgaggaguucuaccagagcacgugcuccgccgucagcaagggcuaccucuccgcccugcgcaccgggugguacaccagcgugaucaccaucgagcuguccaacaucaaggagaacaagugcaacggcaccgacgccaaggugaagcucaucaagcaggagcuggacaaguacaagaacgcggucacggagcugcagcuccugaugcagagcaccccggccgccggguccggcagcgccaucgcguccgggaucgccgugugcaaggugcugcaccucgagggcgaggucaacaagaucaagaacgcccugcugagcaccaacaaggccguggugucccucagcggcugcggggucuccgugcugaccuucaaggugcuggaccucaagaacuacaucgacaagcagcugcugcccauccucaacaagcagagcugcuccaucagcaacaucgagacggucaucgaguuccagcagaagaacaaccggcugcuggagaucacccgcgaguucuccgugaacgccggcgugaccacccccgucagcacguacaugcucaccaacagcgagcugcugucccucaucaacgacaugcccaucaccaacgaccagaagaagcugaugagcaacaacgugcagaucgugcggcagcaguccuacagcaucaugugcaucaucaaggaggagguccuggcguacguggugcagcucccgcuguacggggucaucgacacccccugcuggaagcugcacacgagcccccucugcaccaccaacaccaaggagggcuccaacaucugccugacgcgcaccgaccgggggugguacugcgacaacgccggcuccgugagcuucuucccccaggccgagaccugcaaggugcaguccaaccgcgucuucugcgacaccaugaacagccggacgcucccguccgaggugaaccugugcaacaucgacaucuucaaccccaaguacgacugcaagaucaugaccagcaagaccgacgucuccagcuccgugaucaccagccugggcgccaucguguccugcuacgggaagacgaagugcaccgccagcaacaagugccggggcaucaucaagaccuucuccaacgggugcgacuacgucagcaacaagggcguggacaccgugagcgucggcaacacgcucuacuacgugaacaagcaggaggggaagucccuguacgugaagggcgagcccaucaucaacuucuacgacccccuggucuucccgagcgacgaguucgacgcguccaucagccaggugaacgagaagaucaaccagucccucgccuucauccgcaagagcgacgagcugcugcacaacgugaacgucgggaaguccaccaccaacaucaugaucaccaccaucaucaucgugaucaucgugauccuccugcugcucaucgccgucggccuguuccuguacugcaaggcccggugaggacuagucccuguucccagagcccacuuuuuuuucuuuuuuugaaauaaaauagccugucuuucagaucuaaaaaaaaaaaaaaaaaaaaaaaaaaaaaaaaaaaaaaaaaaaaaaaaaaaaaaaaaaaaaaaaaaaaaaaaaaaaaaaaaaaaaaaaaaaaaaaaaaaa

SEQ ID NO: 21680 - RNA, 1796 nt, Artificial Sequence
  mRNA product Design a-1 (A100) comprising derived and/or modified sequence from HRSV(Memphis-37)__AIY60640.1__F-del_DSCav1_mut5 (opt1)
aggagagucccgcagucggcguccagcggcucugcuuguucgugugugugucguugcaggccuuauucaagcuuaccauggagcugcccauccucaagaccaacgccaucaccacgauccuggccgcggugacccugugcuucgccagcucccagaacaucaccgaggaguucuaccagagcacgugcuccgccgucagcaagggcuaccucuccgcccugcgcaccgggugguacaccagcgugaucaccaucgagcuguccaacaucaaggagaacaagugcaacggcaccgacgccaaggugaagcucaucaagcaggagcuggacaaguacaagaacgcggucacggagcugcagcuccugaugcagagcaccccggccgccggguccggcagcgccaucgcguccgggaucgccgugugcaaggugcugcaccucgagggcgaggucaacaagaucaagaacgcccugcugagcaccaacaaggccguggugucccucagcggcugcggggucuccgugcugaccuucaaggugcuggaccucaagaacuacaucgacaagcagcugcugcccauccucaacaagcagagcugcuccaucagcaacaucgagacggucaucgaguuccagcagaagaacaaccggcugcuggagaucacccgcgaguucuccgugaacgccggcgugaccacccccgucagcacguacaugcucaccaacagcgagcugcugucccucaucaacgacaugcccaucaccaacgaccagaagaagcugaugagcaacaacgugcagaucgugcggcagcaguccuacagcaucaugugcaucaucaaggaggagguccuggcguacguggugcagcucccgcuguacggggucaucgacacccccugcuggaagcugcacacgagcccccucugcaccaccaacaccaaggagggcagcaacaucugccugacgcgcaccgaccgggggugguacugcgacaacgccggcuccgugagcuucuucccccaggccgagaccugcaaggugcaguccaaccgcgucuucugcgacaccaugaacagccggacgcugccguccgaggugaaccucugcaacaucgacaucuucaaccccaaguacgacugcaagaucaugaccagcaagaccgacgucuccagcuccgugaucaccagccugggcgccaucguguccugcuacgggaagacgaagugcaccgccagcaacaagugccgcggcaucaucaagaccuucuccaacgggugcgacuacgucagcaacaagggcguggacaccgugagcgucggcaacacgcuguacuacgugaacaagcaggaggggaagucccucuacgugaagggcgagcccaucaucaacuucuacgacccccuggucuucccgagcgacgaguucgacgcguccaucagccaggugaacgagaagaucaaccagucccuggccuucauccggaaguccgacgagcuccugcacaacgugaacgucgggaaguccaccaccaacaucaugaucaccaccaucaucaucgugaucaucgugauccugcuccugcugaucgccgucggccuguuccucuacugcaaggcccgcugaggacuagucccuguucccagagcccacuuuuuuuucuuuuuuugaaauaaaauagccugucuuucagaucuaaaaaaaaaaaaaaaaaaaaaaaaaaaaaaaaaaaaaaaaaaaaaaaaaaaaaaaaaaaaaaaaaaaaaaaaaaaaaaaaaaaaaaaaaaaaaaaaaaaa

SEQ ID NO: 21681 - RNA, 1856 nt, Artificial Sequence
  mRNA product Design a-1 (A100) comprising derived and/or modified sequence from HRSV(Memphis-37)__AIY60640.1__F_DSCav1_mut6 (opt1)
aggagagucccgcagucggcguccagcggcucugcuuguucgugugugugucguugcaggccuuauucaagcuuaccauggagcugcccauccucaagaccaacgccaucaccacgauccuggccgcggugacccugugcuucgccagcucccagaacaucaccgaggaguucuaccagagcacgugcuccgccgucagcaagggcuaccucggcgcccugcgcaccgggugguacaccagcgugaucaccaucgagcuguccaacaucaaggagaacaagugcaacggcaccgacgccaaggugaagcucaucaagcaggagcuggacaaguacaagaacgcggucacggaccugcagaugcugaugugcagcaccccggccgccggcuccgggagcgcgaucgccuccggcaucgccgucugcaaggugcugcaccucgagggcgaggugaacaagaucaagaacgcccugcuguccaccaacaaggccgucgugagccucuccaacggggugagcguccugaccuucaaggugcuggaccucaagaacuacaucgacaagcagcugcugcccauccugaacaagcagagcugcuccauccccaaccccgagaccgucauggaguuccagcagaagaacaaccgccuccuggagaucacgcgggaguucagcgugaacgcgggcgugaccacccccgucuccaccuacaugcugacgaacagcgagcuccugucccugaucaacgacaugccgaucaccaacgaccagaagaagcucaugagcaacaacgugcagaucgugcgccagcaguccuacagcaucaugugcaucaucaaggaggagguccuggccuacguggugcagcugccccucuacggggucaucgacacccccugcuggaagcugcacaccagcccccugugcacgaccaacaccaaggagggcuccaacaucugccucacccggacggaccgcgggugguacugcgacaacgccggcagcguguccuucuucccgcaggccgagaccugcaaggucugcagcaaccggguguucugcgacaccaugaacucccugacccugcccagcgaggugaaccucugcaacaucgacaucuucaaccccaaguacgacugcaagaucaugacguccaagaccgacgucagcuccagcgugaucaccucccugggcgccaucgugagcugcuacgggaagaccaagugcacggcgagcaacaagaacaagggcaucaucaagaccuucuccaacgggugcgacuacgucagcaacaagggcguggacaccguguccgucggcaacacccuguacuacgugaacaagcaggagggccagagccucuacgugaagggggagcccaucaucaacuucuacgacccgcuggucuuccccuccgacgaguucgacgccagcaucucccaggugaacgagaagaucaaccagagccuggccuucauccggaaguccgacgagcuccugcacaacgugaacgucggcaagagcaccacgaacaucaugaucaccaccaucaucaucgugaucaucgugauccugcugcuccugaucgccgucgggcuguuccucuacugcaaggcccgcuccacccccgugacgcugagcaaggaccagcuguccgggaucaacaacaucgcguucagcaacugaggacuagucccuguucccagagcccacuuuuuuuucuuuuuuugaaauaaaauagccugucuuucagaucuaaaaaaaaaaaaaaaaaaaaaaaaaaaaaaaaaaaaaaaaaaaaaaaaaaaaaaaaaaaaaaaaaaaaaaaaaaaaaaaaaaaaaaaaaaaaaaaaaaaa

SEQ ID NO: 21682 - RNA, 1856 nt, Artificial Sequence
  mRNA product Design a-1 (A100) comprising derived and/or modified sequence from HRSV(Memphis-37)__AIY60640.1__F_DSCav1_mut6 (opt1)
aggagagucccgcagucggcguccagcggcucugcuuguucgugugugugucguugcaggccuuauucaagcuuaccauggagcugcccauccucaagaccaacgccaucaccacgauccuggccgcggugacccugugcuucgccagcucccagaacaucaccgaggaguucuaccagagcacgugcuccgccgucagcaagggcuaccucggggcccugcgcaccggcugguacaccuccgugaucaccaucgagcugagcaacaucaaggagaacaagugcaacgggaccgacgccaaggugaagcucaucaagcaggagcuggacaaguacaagaacgcggucacggaccugcagaugcucaugugcuccaccccggccgccggcagcggguccgccaucgcgagcggcaucgccgugugcaaggugcugcaccuggagggcgaggucaacaagaucaagaacgcccuccuguccaccaacaaggccguggugagccuguccaacggggucagcgugcucaccuucaaggugcuggaccugaagaacuacaucgacaagcagcuccugcccauccugaacaagcaguccugcagcauccccaaccccgagacggucauggaguuccagcagaagaacaaccggcuccuggagaucacccgcgaguucuccgugaacgccggcgugaccaccccggucagcacguacaugcugaccaacuccgagcuccugagccugaucaacgacaugcccaucaccaacgaccagaagaagcucaugagcaacaacgugcagaucgugcggcagcaguccuacagcaucaugugcaucaucaaggaggagguccuggcguacguggugcagcugccccucuacggggucaucgacacccccugcuggaagcugcacacguccccgcugugcaccaccaacaccaaggagggcagcaacaucugccucacgcgcaccgaccgggggugguacugcgacaacgccggcuccgugagcuucuucccccaggccgagaccugcaaggugugcuccaaccgcgucuucugcgacaccaugaacagccugacgcugcccuccgaggugaaccucugcaacaucgacaucuucaaccccaaguacgacugcaagaucaugaccagcaagaccgacgucuccagcuccgugaucaccagccugggcgccaucguguccugcuacgggaagacgaagugcaccgccagcaacaagaacaagggcaucaucaagaccuucuccaacgggugcgacuacgucagcaacaagggcguggacaccguguccgucggcaacacgcuguacuacgugaacaagcaggaggggcagagccucuacgugaagggcgagccgaucaucaacuucuacgacccccuggucuuccccagcgacgaguucgacgcguccaucagccaggugaacgagaagaucaaccagucccuggccuucauccgcaagagcgacgagcuccugcacaacgugaacgucgggaaguccaccaccaacaucaugaucaccaccaucaucaucgugaucaucgugauccugcuccugcugaucgccgucggccucuuccuguacugcaaggcccggagcacgcccgugacccuguccaaggaccagcugagcgggaucaacaacaucgccuucuccaacugaggacuagucccuguucccagagcccacuuuuuuuucuuuuuuugaaauaaaauagccugucuuucagaucuaaaaaaaaaaaaaaaaaaaaaaaaaaaaaaaaaaaaaaaaaaaaaaaaaaaaaaaaaaaaaaaaaaaaaaaaaaaaaaaaaaaaaaaaaaaaaaaaaaaa

SEQ ID NO: 21683 - RNA, 1856 nt, Artificial Sequence
  mRNA product Design a-1 (A100) comprising derived and/or modified sequence from HRSV(Memphis-37)__AIY60640.1__F_DSCav1_mut6 (opt1)
aggagagucccgcagucggcguccagcggcucugcuuguucgugugugugucguugcaggccuuauucaagcuuaccauggagcugcccauccucaagaccaacgccaucaccacgauccuggccgcggugacccugugcuucgccagcucccagaacaucaccgaggaguucuaccagagcacgugcuccgccgucagcaagggcuaccucggggcccugcgcaccggcugguacaccuccgugaucaccaucgagcugagcaacaucaaggagaacaagugcaacgggaccgacgccaaggugaagcucaucaagcaggagcuggacaaguacaagaacgcggucacggaccugcagaugcucaugugcuccaccccggccgccggcagcggguccgccaucgcgagcggcaucgccgugugcaaggugcugcaccuggagggcgaggucaacaagaucaagaacgcccuccuguccaccaacaaggccguggugagccuguccaacggggucagcgugcucaccuucaaggugcuggaccugaagaacuacaucgacaagcagcuccugcccauccugaacaagcaguccugcagcauccccaaccccgagacggucauggaguuccagcagaagaacaaccggcuccuggagaucacccgcgaguucuccgugaacgccggcgugaccaccccggucagcacguacaugcugaccaacuccgagcuccugagccugaucaacgacaugcccaucaccaacgaccagaagaagcucaugagcaacaacgugcagaucgugcggcagcaguccuacagcaucaugugcaucaucaaggaggagguccuggcguacguggugcagcugccccucuacggggucaucgacacccccugcuggaagcugcacacguccccgcugugcaccaccaacaccaaggagggcagcaacaucugccucacgcgcaccgaccgggggugguacugcgacaacgccggcuccgugagcuucuucccccaggccgagaccugcaaggugugcuccaaccgcgucuucugcgacaccaugaacagccugacgcugcccuccgaggugaaccucugcaacaucgacaucuucaaccccaaguacgacugcaagaucaugaccagcaagaccgacgucuccagcuccgugaucaccagccugggcgccaucguguccugcuacgggaagacgaagugcaccgccagcaacaagaacaagggcaucaucaagaccuucuccaacgggugcgacuacgucagcaacaagggcguggacaccguguccgucggcaacacgcuguacuacgugaacaagcaggaggggcagagccucuacgugaagggcgagccgaucaucaacuucuacgacccccuggucuuccccagcgacgaguucgacgcguccaucagccaggugaacgagaagaucaaccagucccuggccuucauccgcaagagcgacgagcuccugcacaacgugaacgucgggaaguccaccaccaacaucaugaucaccaccaucaucaucgugaucaucgugauccugcuccugcugaucgccgucggccuguuccucuacugcaaggcccggagcacgcccgugacccuguccaaggaccagcugagcgggaucaacaacaucgccuucuccaacugaggacuagucccuguucccagagcccacuuuuuuuucuuuuuuugaaauaaaauagccugucuuucagaucuaaaaaaaaaaaaaaaaaaaaaaaaaaaaaaaaaaaaaaaaaaaaaaaaaaaaaaaaaaaaaaaaaaaaaaaaaaaaaaaaaaaaaaaaaaaaaaaaaaaa

SEQ ID NO: 21684 - RNA, 1793 nt, Artificial Sequence
  mRNA product Design a-1 (A100) comprising derived and/or modified sequence from HRSV(Memphis-37)__AIY60640.1__F-del_DSCav1_mut6 (opt1)
aggagagucccgcagucggcguccagcggcucugcuuguucgugugugugucguugcaggccuuauucaagcuuaccauggagcugcccauccucaagaccaacgccaucaccacgauccuggccgcggugacccugugcuucgccagcucccagaacaucaccgaggaguucuaccagagcacgugcuccgccgucagcaagggcuaccucggcgcccugcgcaccgggugguacaccagcgugaucaccaucgagcuguccaacaucaaggagaacaagugcaacggcaccgacgccaaggugaagcucaucaagcaggagcuggacaaguacaagaacgcggucacggaccugcagaugcugaugugcagcaccccggccgccggcuccgggagcgcgaucgccuccggcaucgccgucugcaaggugcugcaccucgagggcgaggugaacaagaucaagaacgcccugcuguccaccaacaaggccgucgugagccucuccaacggggugagcguccugaccuucaaggugcuggaccucaagaacuacaucgacaagcagcugcugcccauccugaacaagcagagcugcuccauccccaaccccgagaccgucauggaguuccagcagaagaacaaccgccuccuggagaucacgcgggaguucagcgugaacgcgggcgugaccacccccgucuccaccuacaugcugacgaacagcgagcuccugucccugaucaacgacaugccgaucaccaacgaccagaagaagcucaugagcaacaacgugcagaucgugcgccagcaguccuacagcaucaugugcaucaucaaggaggagguccuggccuacguggugcagcugccccucuacggggucaucgacacccccugcuggaagcugcacaccagcccccugugcacgaccaacaccaaggagggcuccaacaucugccucacccggacggaccgcgggugguacugcgacaacgccggcagcguguccuucuucccgcaggccgagaccugcaaggucugcagcaaccggguguucugcgacaccaugaacucccugacccugcccagcgaggugaaccucugcaacaucgacaucuucaaccccaaguacgacugcaagaucaugacguccaagaccgacgucagcuccagcgugaucaccucccugggcgccaucgugagcugcuacgggaagaccaagugcacggcgagcaacaagaacaagggcaucaucaagaccuucuccaacgggugcgacuacgucagcaacaagggcguggacaccguguccgucggcaacacccuguacuacgugaacaagcaggagggccagagccucuacgugaagggggagcccaucaucaacuucuacgacccgcuggucuuccccuccgacgaguucgacgccagcaucucccaggugaacgagaagaucaaccagagccuggccuucauccggaaguccgacgagcuccugcacaacgugaacgucggcaagagcaccacgaacaucaugaucaccaccaucaucaucgugaucaucgugauccugcugcuccugaucgccgucgggcuguuccucuacugcaaggcccgcugaggacuagucccuguucccagagcccacuuuuuuuucuuuuuuugaaauaaaauagccugucuuucagaucuaaaaaaaaaaaaaaaaaaaaaaaaaaaaaaaaaaaaaaaaaaaaaaaaaaaaaaaaaaaaaaaaaaaaaaaaaaaaaaaaaaaaaaaaaaaaaaaaaaaa

SEQ ID NO: 21685 - RNA, 1793 nt, Artificial Sequence
  mRNA product Design a-1 (A100) comprising derived and/or modified sequence from HRSV(Memphis-37)__AIY60640.1__F-del_DSCav1_mut6 (opt1)
aggagagucccgcagucggcguccagcggcucugcuuguucgugugugugucguugcaggccuuauucaagcuuaccauggagcugcccauccucaagaccaacgccaucaccacgauccuggccgcggugacccugugcuucgccagcucccagaacaucaccgaggaguucuaccagagcacgugcuccgccgucagcaagggcuaccucggggcccugcgcaccggcugguacaccuccgugaucaccaucgagcugagcaacaucaaggagaacaagugcaacgggaccgacgccaaggugaagcucaucaagcaggagcuggacaaguacaagaacgcggucacggaccugcagaugcucaugugcuccaccccggccgccggcagcggguccgccaucgcgagcggcaucgccgugugcaaggugcugcaccuggagggcgaggucaacaagaucaagaacgcccuccuguccaccaacaaggccguggugagccuguccaacggggucagcgugcucaccuucaaggugcuggaccugaagaacuacaucgacaagcagcuccugcccauccugaacaagcaguccugcagcauccccaaccccgagacggucauggaguuccagcagaagaacaaccggcuccuggagaucacccgcgaguucuccgugaacgccggcgugaccaccccggucagcacguacaugcugaccaacuccgagcuccugagccugaucaacgacaugcccaucaccaacgaccagaagaagcucaugagcaacaacgugcagaucgugcggcagcaguccuacagcaucaugugcaucaucaaggaggagguccuggcguacguggugcagcugccccucuacggggucaucgacacccccugcuggaagcugcacacguccccgcugugcaccaccaacaccaaggagggcagcaacaucugccucacgcgcaccgaccgggggugguacugcgacaacgccggcuccgugagcuucuucccccaggccgagaccugcaaggugugcuccaaccgcgucuucugcgacaccaugaacagccugacgcugcccuccgaggugaaccucugcaacaucgacaucuucaaccccaaguacgacugcaagaucaugaccagcaagaccgacgucuccagcuccgugaucaccagccugggcgccaucguguccugcuacgggaagacgaagugcaccgccagcaacaagaacaagggcaucaucaagaccuucuccaacgggugcgacuacgucagcaacaagggcguggacaccguguccgucggcaacacgcuguacuacgugaacaagcaggaggggcagagccucuacgugaagggcgagccgaucaucaacuucuacgacccccuggucuuccccagcgacgaguucgacgcguccaucagccaggugaacgagaagaucaaccagucccuggccuucauccgcaagagcgacgagcuccugcacaacgugaacgucgggaaguccaccaccaacaucaugaucaccaccaucaucaucgugaucaucgugauccugcuccugcugaucgccgucggccucuuccuguacugcaaggcccggugaggacuagucccuguucccagagcccacuuuuuuuucuuuuuuugaaauaaaauagccugucuuucagaucuaaaaaaaaaaaaaaaaaaaaaaaaaaaaaaaaaaaaaaaaaaaaaaaaaaaaaaaaaaaaaaaaaaaaaaaaaaaaaaaaaaaaaaaaaaaaaaaaaaaa

SEQ ID NO: 21686 - RNA, 1793 nt, Artificial Sequence
  mRNA product Design a-1 (A100) comprising derived and/or modified sequence from HRSV(Memphis-37)__AIY60640.1__F-del_DSCav1_mut6 (opt1)
aggagagucccgcagucggcguccagcggcucugcuuguucgugugugugucguugcaggccuuauucaagcuuaccauggagcugcccauccucaagaccaacgccaucaccacgauccuggccgcggugacccugugcuucgccagcucccagaacaucaccgaggaguucuaccagagcacgugcuccgccgucagcaagggcuaccucggggcccugcgcaccggcugguacaccuccgugaucaccaucgagcugagcaacaucaaggagaacaagugcaacgggaccgacgccaaggugaagcucaucaagcaggagcuggacaaguacaagaacgcggucacggaccugcagaugcucaugugcuccaccccggccgccggcagcggguccgccaucgcgagcggcaucgccgugugcaaggugcugcaccuggagggcgaggucaacaagaucaagaacgcccuccuguccaccaacaaggccguggugagccuguccaacggggucagcgugcucaccuucaaggugcuggaccugaagaacuacaucgacaagcagcuccugcccauccugaacaagcaguccugcagcauccccaaccccgagacggucauggaguuccagcagaagaacaaccggcuccuggagaucacccgcgaguucuccgugaacgccggcgugaccaccccggucagcacguacaugcugaccaacuccgagcuccugagccugaucaacgacaugcccaucaccaacgaccagaagaagcucaugagcaacaacgugcagaucgugcggcagcaguccuacagcaucaugugcaucaucaaggaggagguccuggcguacguggugcagcugccccucuacggggucaucgacacccccugcuggaagcugcacacguccccgcugugcaccaccaacaccaaggagggcagcaacaucugccucacgcgcaccgaccgggggugguacugcgacaacgccggcuccgugagcuucuucccccaggccgagaccugcaaggugugcuccaaccgcgucuucugcgacaccaugaacagccugacgcugcccuccgaggugaaccucugcaacaucgacaucuucaaccccaaguacgacugcaagaucaugaccagcaagaccgacgucuccagcuccgugaucaccagccugggcgccaucguguccugcuacgggaagacgaagugcaccgccagcaacaagaacaagggcaucaucaagaccuucuccaacgggugcgacuacgucagcaacaagggcguggacaccguguccgucggcaacacgcuguacuacgugaacaagcaggaggggcagagccucuacgugaagggcgagccgaucaucaacuucuacgacccccuggucuuccccagcgacgaguucgacgcguccaucagccaggugaacgagaagaucaaccagucccuggccuucauccgcaagagcgacgagcuccugcacaacgugaacgucgggaaguccaccaccaacaucaugaucaccaccaucaucaucgugaucaucgugauccugcuccugcugaucgccgucggccuguuccucuacugcaaggcccggugaggacuagucccuguucccagagcccacuuuuuuuucuuuuuuugaaauaaaauagccugucuuucagaucuaaaaaaaaaaaaaaaaaaaaaaaaaaaaaaaaaaaaaaaaaaaaaaaaaaaaaaaaaaaaaaaaaaaaaaaaaaaaaaaaaaaaaaaaaaaaaaaaaaaa

SEQ ID NO: 21687 - RNA, 1856 nt, Artificial Sequence
  mRNA product Design a-1 (A100) comprising derived and/or modified sequence from HRSV(Memphis-37)__AIY60640.1__F_DSCav1_mut7 (opt1)
aggagagucccgcagucggcguccagcggcucugcuuguucgugugugugucguugcaggccuuauucaagcuuaccauggagcugcccauccucaagaccaacgccaucaccacgauccuggccgcggugacccugugcuucgccagcucccagaacaucaccgaggaguucuaccagagcacgugcuccgccgucagcaagggcuaccucuccgcccugcgcaccgggugguacaccagcgugaucaccaucgagcuguccaacaucaaggagaacaagugcaacggcaccgacgccaaggugaagcucaucaagcaggagcuggacaaguacaagaacgcggucacggagcugcagaugcugaugugcagcaccccggccgccggcuccgggagcgcgaucgccuccggcaucgccgucugcaaggugcugcaccucgagggcgaggugaacaagaucaagaacgcccugcuguccaccaacaaggccgucgugagccucuccaacggggugagcguccugaccuucaaggugcuggaccucaagaacuacaucgacaagcagcugcugcccauccugaacaagcagagcugcuccaucagcaacaucgagaccgucauggaguuccagcagaagaacaaccgccuccuggagaucacgcgggaguucagcgugaacgcgggcgugaccacccccgucuccaccuacaugcugacgaacagcgagcuccugucccugaucaacgacaugccgaucaccaacgaccagaagaagcucaugagcaacaacgugcagaucgugcgccagcaguccuacagcaucaugugcaucaucaaggaggagguccuggccuacguggugcagcugccccucuacggggucaucgacacccccugcuggaagcugcacaccagcccccugugcacgaccaacaccaaggagggcuccaacaucugccucacccggacggaccgcgggugguacugcgacaacgccggcagcguguccuucuucccgcaggccgagaccugcaaggucugcagcaaccggguguucugcgacaccaugaacucccugacccugcccagcgaggugaaccucugcaacaucgacaucuucaaccccaaguacgacugcaagaucaugacguccaagaccgacgucagcuccagcgugaucaccucccugggcgccaucgugagcugcuacgggaagaccaagugcacggcgagcaacaagaacaagggcaucaucaagaccuucuccaacgggugcgacuacgucagcaacaagggcguggacaccguguccgucggcaacacccuguacuacgugaacaagcaggagggcaagagccucuacgugaagggggagcccaucaucaacuucuacgacccgcuggucuuccccuccgacgaguucgacgccagcaucucccaggugaacgagaagaucaaccagagccuggccuucauccggaaguccgacgagcuccugcacaacgugaacgucggcaagagcaccacgaacaucaugaucaccaccaucaucaucgugaucaucgugauccugcugcuccugaucgccgucgggcuguuccucuacugcaaggcccgcuccacccccgugacgcugagcaaggaccagcuguccgggaucaacaacaucgcguucagcaacugaggacuagucccuguucccagagcccacuuuuuuuucuuuuuuugaaauaaaauagccugucuuucagaucuaaaaaaaaaaaaaaaaaaaaaaaaaaaaaaaaaaaaaaaaaaaaaaaaaaaaaaaaaaaaaaaaaaaaaaaaaaaaaaaaaaaaaaaaaaaaaaaaaaaa

SEQ ID NO: 21688 - RNA, 1856 nt, Artificial Sequence
  mRNA product Design a-1 (A100) comprising derived and/or modified sequence from HRSV(Memphis-37)__AIY60640.1__F_DSCav1_mut7 (opt1)
aggagagucccgcagucggcguccagcggcucugcuuguucgugugugugucguugcaggccuuauucaagcuuaccauggagcugcccauccucaagaccaacgccaucaccacgauccuggccgcggugacccugugcuucgccagcucccagaacaucaccgaggaguucuaccagagcacgugcuccgccgucagcaagggcuaccucuccgcccugcgcaccgggugguacaccagcgugaucaccaucgagcuguccaacaucaaggagaacaagugcaacggcaccgacgccaaggugaagcucaucaagcaggagcuggacaaguacaagaacgcggucacggagcugcagaugcucaugugcagcaccccggccgccggguccggcagcgccaucgcguccgggaucgccgugugcaaggugcugcaccuggagggcgaggucaacaagaucaagaacgcccuccugagcaccaacaaggccguggugucccugagcaacggcgucuccgugcucaccuucaaggugcuggaccugaagaacuacaucgacaagcagcuccugcccauccugaacaagcagagcugcuccaucagcaacaucgagacggucauggaguuccagcagaagaacaaccggcuccuggagaucacccgcgaguucuccgugaacgccggggugaccacccccgucagcacguacaugcugaccaacagcgagcuccugucccugaucaacgacaugcccaucaccaacgaccagaagaagcucaugagcaacaacgugcagaucgugcggcagcaguccuacagcaucaugugcaucaucaaggaggagguccuggcguacguggugcagcugccgcucuacggcgucaucgacacccccugcuggaagcugcacacgagcccccugugcaccaccaacaccaaggaggggagcaacaucugccucacgcgcaccgaccggggcugguacugcgacaacgccggguccgugagcuucuucccccaggccgagaccugcaaggugugcuccaaccgcgucuucugcgacaccaugaacagccugacgcugccguccgaggugaaccucugcaacaucgacaucuucaaccccaaguacgacugcaagaucaugaccagcaagaccgacgucuccagcuccgugaucaccagccugggcgccaucguguccugcuacggcaagacgaagugcaccgccagcaacaagaacaaggggaucaucaagaccuucuccaacggcugcgacuacgucagcaacaaggggguggacaccgugagcgucggcaacacgcuguacuacgugaacaagcaggagggcaagucccucuacgugaagggggagcccaucaucaacuucuacgacccccuggucuucccgagcgacgaguucgacgcguccaucagccaggugaacgagaagaucaaccagucccuggccuucauccggaaguccgacgagcuccugcacaacgugaacgucggcaaguccaccaccaacaucaugaucaccaccaucaucaucgugaucaucgugauccugcuccugcugaucgccgucggccucuuccuguacugcaaggcccgcagcacgcccgugacccuguccaaggaccagcugagcgggaucaacaacaucgccuucuccaacugaggacuagucccuguucccagagcccacuuuuuuuucuuuuuuugaaauaaaauagccugucuuucagaucuaaaaaaaaaaaaaaaaaaaaaaaaaaaaaaaaaaaaaaaaaaaaaaaaaaaaaaaaaaaaaaaaaaaaaaaaaaaaaaaaaaaaaaaaaaaaaaaaaaaa

SEQ ID NO: 21689 - RNA, 1856 nt, Artificial Sequence
  mRNA product Design a-1 (A100) comprising derived and/or modified sequence from HRSV(Memphis-37)__AIY60640.1__F_DSCav1_mut7 (opt1)
aggagagucccgcagucggcguccagcggcucugcuuguucgugugugugucguugcaggccuuauucaagcuuaccauggagcugcccauccucaagaccaacgccaucaccacgauccuggccgcggugacccugugcuucgccagcucccagaacaucaccgaggaguucuaccagagcacgugcuccgccgucagcaagggcuaccucuccgcccugcgcaccgggugguacaccagcgugaucaccaucgagcuguccaacaucaaggagaacaagugcaacggcaccgacgccaaggugaagcucaucaagcaggagcuggacaaguacaagaacgcggucacggagcugcagaugcucaugugcagcaccccggccgccggguccggcagcgccaucgcguccgggaucgccgugugcaaggugcugcaccuggagggcgaggucaacaagaucaagaacgcccuccugagcaccaacaaggccguggugucccugagcaacggcgucuccgugcucaccuucaaggugcuggaccugaagaacuacaucgacaagcagcuccugcccauccugaacaagcagagcugcuccaucagcaacaucgagacggucauggaguuccagcagaagaacaaccggcuccuggagaucacccgcgaguucuccgugaacgccggggugaccacccccgucagcacguacaugcugaccaacagcgagcuccugucccugaucaacgacaugcccaucaccaacgaccagaagaagcucaugagcaacaacgugcagaucgugcggcagcaguccuacagcaucaugugcaucaucaaggaggagguccuggcguacguggugcagcugccgcucuacggcgucaucgacacccccugcuggaagcugcacacgagcccccugugcaccaccaacaccaaggaggggagcaacaucugccucacgcgcaccgaccggggcugguacugcgacaacgccggguccgugagcuucuucccccaggccgagaccugcaaggugugcuccaaccgcgucuucugcgacaccaugaacagccugacgcugccguccgaggugaaccucugcaacaucgacaucuucaaccccaaguacgacugcaagaucaugaccagcaagaccgacgucuccagcuccgugaucaccagccugggcgccaucguguccugcuacggcaagacgaagugcaccgccagcaacaagaacaaggggaucaucaagaccuucuccaacggcugcgacuacgucagcaacaaggggguggacaccgugagcgucggcaacacgcuguacuacgugaacaagcaggagggcaagucccucuacgugaagggggagcccaucaucaacuucuacgacccccuggucuucccgagcgacgaguucgacgcguccaucagccaggugaacgagaagaucaaccagucccuggccuucauccggaaguccgacgagcuccugcacaacgugaacgucggcaaguccaccaccaacaucaugaucaccaccaucaucaucgugaucaucgugauccugcuccugcugaucgccgucgggcuguuccucuacugcaaggcccgcagcacgcccgugacccuguccaaggaccagcugagcggcaucaacaacaucgccuucuccaacugaggacuagucccuguucccagagcccacuuuuuuuucuuuuuuugaaauaaaauagccugucuuucagaucuaaaaaaaaaaaaaaaaaaaaaaaaaaaaaaaaaaaaaaaaaaaaaaaaaaaaaaaaaaaaaaaaaaaaaaaaaaaaaaaaaaaaaaaaaaaaaaaaaaaa

SEQ ID NO: 21690 - RNA, 1793 nt, Artificial Sequence
  mRNA product Design a-1 (A100) comprising derived and/or modified sequence from HRSV(Memphis-37)__AIY60640.1__F-del_DSCav1_mut7 (opt1)
aggagagucccgcagucggcguccagcggcucugcuuguucgugugugugucguugcaggccuuauucaagcuuaccauggagcugcccauccucaagaccaacgccaucaccacgauccuggccgcggugacccugugcuucgccagcucccagaacaucaccgaggaguucuaccagagcacgugcuccgccgucagcaagggcuaccucuccgcccugcgcaccgggugguacaccagcgugaucaccaucgagcuguccaacaucaaggagaacaagugcaacggcaccgacgccaaggugaagcucaucaagcaggagcuggacaaguacaagaacgcggucacggagcugcagaugcugaugugcagcaccccggccgccggcuccgggagcgcgaucgccuccggcaucgccgucugcaaggugcugcaccucgagggcgaggugaacaagaucaagaacgcccugcuguccaccaacaaggccgucgugagccucuccaacggggugagcguccugaccuucaaggugcuggaccucaagaacuacaucgacaagcagcugcugcccauccugaacaagcagagcugcuccaucagcaacaucgagaccgucauggaguuccagcagaagaacaaccgccuccuggagaucacgcgggaguucagcgugaacgcgggcgugaccacccccgucuccaccuacaugcugacgaacagcgagcuccugucccugaucaacgacaugccgaucaccaacgaccagaagaagcucaugagcaacaacgugcagaucgugcgccagcaguccuacagcaucaugugcaucaucaaggaggagguccuggccuacguggugcagcugccccucuacggggucaucgacacccccugcuggaagcugcacaccagcccccugugcacgaccaacaccaaggagggcuccaacaucugccucacccggacggaccgcgggugguacugcgacaacgccggcagcguguccuucuucccgcaggccgagaccugcaaggucugcagcaaccggguguucugcgacaccaugaacucccugacccugcccagcgaggugaaccucugcaacaucgacaucuucaaccccaaguacgacugcaagaucaugacguccaagaccgacgucagcuccagcgugaucaccucccugggcgccaucgugagcugcuacgggaagaccaagugcacggcgagcaacaagaacaagggcaucaucaagaccuucuccaacgggugcgacuacgucagcaacaagggcguggacaccguguccgucggcaacacccuguacuacgugaacaagcaggagggcaagagccucuacgugaagggggagcccaucaucaacuucuacgacccgcuggucuuccccuccgacgaguucgacgccagcaucucccaggugaacgagaagaucaaccagagccuggccuucauccggaaguccgacgagcuccugcacaacgugaacgucggcaagagcaccacgaacaucaugaucaccaccaucaucaucgugaucaucgugauccugcugcuccugaucgccgucgggcuguuccucuacugcaaggcccgcugaggacuagucccuguucccagagcccacuuuuuuuucuuuuuuugaaauaaaauagccugucuuucagaucuaaaaaaaaaaaaaaaaaaaaaaaaaaaaaaaaaaaaaaaaaaaaaaaaaaaaaaaaaaaaaaaaaaaaaaaaaaaaaaaaaaaaaaaaaaaaaaaaaaaa

SEQ ID NO: 21691 - RNA, 1793 nt, Artificial Sequence
  mRNA product Design a-1 (A100) comprising derived and/or modified sequence from HRSV(Memphis-37)__AIY60640.1__F-del_DSCav1_mut7 (opt1)
aggagagucccgcagucggcguccagcggcucugcuuguucgugugugugucguugcaggccuuauucaagcuuaccauggagcugcccauccucaagaccaacgccaucaccacgauccuggccgcggugacccugugcuucgccagcucccagaacaucaccgaggaguucuaccagagcacgugcuccgccgucagcaagggguaccucuccgcccugcgcaccgggugguacaccagcgugaucaccaucgagcuguccaacaucaaggagaacaagugcaacggcaccgacgccaaggugaagcucaucaagcaggagcuggacaaguacaagaacgcggucacggagcugcagaugcucaugugcagcaccccggccgccggguccggcagcgccaucgcguccgggaucgccgugugcaaggugcugcaccuggagggcgaggucaacaagaucaagaacgcccuccugagcaccaacaaggccguggugucccugagcaacggcgucuccgugcucaccuucaaggugcuggaccugaagaacuacaucgacaagcagcuccugcccauccugaacaagcagagcugcuccaucagcaacaucgagacggucauggaguuccagcagaagaacaaccggcuccuggagaucacccgcgaguucuccgugaacgccggggugaccacccccgucagcacguacaugcugaccaacagcgagcuccugucccugaucaacgacaugcccaucaccaacgaccagaagaagcucaugagcaacaacgugcagaucgugcggcagcaguccuacagcaucaugugcaucaucaaggaggagguccuggcguacguggugcagcugccgcucuacggcgucaucgacacccccugcuggaagcugcacacgagcccccugugcaccaccaacaccaaggaggggagcaacaucugccucacgcgcaccgaccggggcugguacugcgacaacgccggguccgugagcuucuucccccaggccgagaccugcaaggugugcuccaaccgcgucuucugcgacaccaugaacagccugacgcugccguccgaggugaaccucugcaacaucgacaucuucaaccccaaguacgacugcaagaucaugaccagcaagaccgacgucuccagcuccgugaucaccagccugggcgccaucguguccugcuacggcaagacgaagugcaccgccagcaacaagaacaaggggaucaucaagaccuucuccaacggcugcgacuacgucagcaacaaggggguggacaccgugagcgucggcaacacgcuguacuacgugaacaagcaggagggcaagucccucuacgugaagggggagcccaucaucaacuucuacgacccccuggucuucccgagcgacgaguucgacgcguccaucagccaggugaacgagaagaucaaccagucccuggccuucauccggaaguccgacgagcuccugcacaacgugaacgucggcaaguccaccaccaacaucaugaucaccaccaucaucaucgugaucaucgugauccugcuccugcugaucgccgucggccucuuccuguacugcaaggcccgcugaggacuagucccuguucccagagcccacuuuuuuuucuuuuuuugaaauaaaauagccugucuuucagaucuaaaaaaaaaaaaaaaaaaaaaaaaaaaaaaaaaaaaaaaaaaaaaaaaaaaaaaaaaaaaaaaaaaaaaaaaaaaaaaaaaaaaaaaaaaaaaaaaaaaa

SEQ ID NO: 21692 - RNA, 1793 nt, Artificial Sequence
  mRNA product Design a-1 (A100) comprising derived and/or modified sequence from HRSV(Memphis-37)__AIY60640.1__F-del_DSCav1_mut7 (opt1)
aggagagucccgcagucggcguccagcggcucugcuuguucgugugugugucguugcaggccuuauucaagcuuaccauggagcugcccauccucaagaccaacgccaucaccacgauccuggccgcggugacccugugcuucgccagcucccagaacaucaccgaggaguucuaccagagcacgugcuccgccgucagcaagggcuaccucuccgcccugcgcaccgggugguacaccagcgugaucaccaucgagcuguccaacaucaaggagaacaagugcaacggcaccgacgccaaggugaagcucaucaagcaggagcuggacaaguacaagaacgcggucacggagcugcagaugcucaugugcagcaccccggccgccggguccggcagcgccaucgcguccgggaucgccgugugcaaggugcugcaccuggagggcgaggucaacaagaucaagaacgcccuccugagcaccaacaaggccguggugucccugagcaacggcgucuccgugcucaccuucaaggugcuggaccugaagaacuacaucgacaagcagcuccugcccauccugaacaagcagagcugcuccaucagcaacaucgagacggucauggaguuccagcagaagaacaaccggcuccuggagaucacccgcgaguucuccgugaacgccggggugaccacccccgucagcacguacaugcugaccaacagcgagcuccugucccugaucaacgacaugcccaucaccaacgaccagaagaagcucaugagcaacaacgugcagaucgugcggcagcaguccuacagcaucaugugcaucaucaaggaggagguccuggcguacguggugcagcugccgcucuacggcgucaucgacacccccugcuggaagcugcacacgagcccccugugcaccaccaacaccaaggaggggagcaacaucugccucacgcgcaccgaccggggcugguacugcgacaacgccggguccgugagcuucuucccccaggccgagaccugcaaggugugcuccaaccgcgucuucugcgacaccaugaacagccugacgcugccguccgaggugaaccucugcaacaucgacaucuucaaccccaaguacgacugcaagaucaugaccagcaagaccgacgucuccagcuccgugaucaccagccugggcgccaucguguccugcuacggcaagacgaagugcaccgccagcaacaagaacaaggggaucaucaagaccuucuccaacggcugcgacuacgucagcaacaaggggguggacaccgugagcgucggcaacacgcuguacuacgugaacaagcaggagggcaagucccucuacgugaagggggagcccaucaucaacuucuacgacccccuggucuucccgagcgacgaguucgacgcguccaucagccaggugaacgagaagaucaaccagucccuggccuucauccggaaguccgacgagcuccugcacaacgugaacgucggcaaguccaccaccaacaucaugaucaccaccaucaucaucgugaucaucgugauccugcuccugcugaucgccgucgggcuguuccucuacugcaaggcccgcugaggacuagucccuguucccagagcccacuuuuuuuucuuuuuuugaaauaaaauagccugucuuucagaucuaaaaaaaaaaaaaaaaaaaaaaaaaaaaaaaaaaaaaaaaaaaaaaaaaaaaaaaaaaaaaaaaaaaaaaaaaaaaaaaaaaaaaaaaaaaaaaaaaaaa

SEQ ID NO: 21693 - RNA, 1859 nt, Artificial Sequence
  mRNA product Design a-1 (A100) comprising derived and/or modified sequence from HRSV(Memphis-37)__AIY60640.1__F_DSCav1_mut8 (opt1)
aggagagucccgcagucggcguccagcggcucugcuuguucgugugugugucguugcaggccuuauucaagcuuaccauggagcugcccauccucaagaccaacgccaucaccacgauccuggccgcggugacccugugcuucgccagcucccagaacaucaccgaggaguucuaccagagcacgugcuccgccgucagcaagggcuaccucggcgcccugcgcaccgggugguacaccagcgugaucaccaucgagcuguccaacaucaaggagaucaagugcaacggcaccgacgccaaggugaagcucaucaagcaggagcuggacaaguacaagaacgcggucacggaccugcagcuccugaugcagagcaccccggccgccggcuccgggagcgcgaucgccuccggcaucgccgucugcaaggugcugcaccucgagggcgaggugaacaagaucaagaacgcccugcuguccaccaacaaggccgucgugagccucuccggcugcggggugagcguccugaccuucaaggugcuggaccucaagaacuacaucgacaagcagcugcugcccauccugaacaagcagagcugcuccauccccaacaucgagaccgucaucgaguuccagcagaagaacaaccgccuccuggagaucacgcgggaguucagcgugaacgcgggcgugaccacccccgucuccaccuacaugcugacgaacagcgagcuccugucccugaucaacgacaugccgaucaccaacgaccagaagaagcucaugagcaacaacgugcagaucgugcgccagcaguccuacagcaucaugugcaucaucaaggaggagguccuggccuacguggugcagcugccccucuacggggucaucgacacccccugcuggaagcugcacaccagcccccugugcacgaccaacaccaaggagggcuccaacaucugccucacccggacggaccgcgggugguacugcgacaacgccggcagcguguccuucuucccgcaggccgagaccugcaagguccagagcaaccggguguucugcgacaccaugaacucccugacccugcccagcgaggugaaccucugcaacaucgacaucuucaaccccaaguacgacugcaagaucaugacguccaagaccgacgucagcuccagcgugaucaccucccugggcgccaucgugagcugcuacgggaagaccaagugcacggcgagcaacaagugccgcggcaucaucaagaccuucuccaacgggugcgacuacgucagcaacaagggcguggacaccguguccgucggcaacacccuguacuacgugaacaagcaggagggccagagccucuacgugaagggggagcccaucaucaacuucuacgacccgcuggucuuccccuccgacgaguucgacgccagcaucucccaggugaacgagaagaucaaccagagccuggccuucauccggaaguccgacgagcuccugcacaacgugaacgucggcaagagcaccacgaacaucaugaucaccaccaucaucaucgugaucaucgugauccugcugcuccugaucgccgucgggcuguuccucuacugcaaggcccgcuccacccccgugacgcugagcaaggaccagcuguccgggaucaacaacaucgcguucagcaacugaggacuagucccuguucccagagcccacuuuuuuuucuuuuuuugaaauaaaauagccugucuuucagaucuaaaaaaaaaaaaaaaaaaaaaaaaaaaaaaaaaaaaaaaaaaaaaaaaaaaaaaaaaaaaaaaaaaaaaaaaaaaaaaaaaaaaaaaaaaaaaaaaaaaa

SEQ ID NO: 21694 - RNA, 1859 nt, Artificial Sequence
  mRNA product Design a-1 (A100) comprising derived and/or modified sequence from HRSV(Memphis-37)__AIY60640.1__F_DSCav1_mut8 (opt1)
aggagagucccgcagucggcguccagcggcucugcuuguucgugugugugucguugcaggccuuauucaagcuuaccauggagcugcccauccucaagaccaacgccaucaccacgauccuggccgcggugacccugugcuucgccagcucccagaacaucaccgaggaguucuaccagagcacgugcuccgccgucagcaagggcuaccucggggcccugcgcaccggcugguacaccuccgugaucaccaucgagcugagcaacaucaaggagaucaagugcaacgggaccgacgccaaggugaagcucaucaagcaggagcuggacaaguacaagaacgcggucacggaccugcagcuccugaugcaguccaccccggccgccggcagcggguccgccaucgcgagcggcaucgccgugugcaaggugcugcaccucgagggcgaggucaacaagaucaagaacgcccugcuguccaccaacaaggccguggugagccucuccgggugcggcgucagcgugcugaccuucaaggugcuggaccucaagaacuacaucgacaagcagcugcugcccauccucaacaagcaguccugcagcauccccaacaucgagacggucaucgaguuccagcagaagaacaaccggcugcuggagaucacccgcgaguucuccgugaacgccggggugaccacccccgucagcacguacaugcucaccaacuccgagcugcugagccucaucaacgacaugccgaucaccaacgaccagaagaagcugaugagcaacaacgugcagaucgugcggcagcaguccuacagcaucaugugcaucaucaaggaggagguccuggcguacguggugcagcucccccuguacggcgucaucgacacccccugcuggaagcugcacacgagcccccucugcaccaccaacaccaaggagggguccaacaucugccugacgcgcaccgaccggggcugguacugcgacaacgccggcuccgugagcuucuucccgcaggccgagaccugcaaggugcaguccaaccgcgucuucugcgacaccaugaacagccugacgcuccccuccgaggugaaccugugcaacaucgacaucuucaaccccaaguacgacugcaagaucaugaccagcaagaccgacgucuccagcuccgugaucaccagccugggggccaucguguccugcuacggcaagacgaagugcaccgccagcaacaagugccgggggaucaucaagaccuucuccaacggcugcgacuacgucagcaacaagggcguggacaccguguccgucgggaacacgcucuacuacgugaacaagcaggagggccagagccuguacgugaagggggagcccaucaucaacuucuacgacccgcuggucuuccccagcgacgaguucgacgcguccaucagccaggugaacgagaagaucaaccagucccucgccuucauccgcaagagcgacgagcugcugcacaacgugaacgucggcaaguccaccaccaacaucaugaucaccaccaucaucaucgugaucaucgugauccuccugcugcucaucgccgucgggcuguuccuguacugcaaggcccggagcacgcccgugacccuguccaaggaccagcucagcggcaucaacaacaucgccuucuccaacugaggacuagucccuguucccagagcccacuuuuuuuucuuuuuuugaaauaaaauagccugucuuucagaucuaaaaaaaaaaaaaaaaaaaaaaaaaaaaaaaaaaaaaaaaaaaaaaaaaaaaaaaaaaaaaaaaaaaaaaaaaaaaaaaaaaaaaaaaaaaaaaaaaaaa

SEQ ID NO: 21695 - RNA, 1859 nt, Artificial Sequence
  mRNA product Design a-1 (A100) comprising derived and/or modified sequence from HRSV(Memphis-37)__AIY60640.1__F_DSCav1_mut8 (opt1)
aggagagucccgcagucggcguccagcggcucugcuuguucgugugugugucguugcaggccuuauucaagcuuaccauggagcugcccauccucaagaccaacgccaucaccacgauccuggccgcggugacccugugcuucgccagcucccagaacaucaccgaggaguucuaccagagcacgugcuccgccgucagcaagggcuaccucggggcccugcgcaccggcugguacaccuccgugaucaccaucgagcugagcaacaucaaggagaucaagugcaacgggaccgacgccaaggugaagcucaucaagcaggagcuggacaaguacaagaacgcggucacggaccugcagcuccugaugcaguccaccccggccgccggcagcggguccgccaucgcgagcggcaucgccgugugcaaggugcugcaccucgagggcgaggucaacaagaucaagaacgcccugcuguccaccaacaaggccguggugagccucuccgggugcggcgucagcgugcugaccuucaaggugcuggaccucaagaacuacaucgacaagcagcugcugcccauccucaacaagcaguccugcagcauccccaacaucgagacggucaucgaguuccagcagaagaacaaccggcugcuggagaucacccgcgaguucuccgugaacgccggggugaccacccccgucagcacguacaugcucaccaacuccgagcugcugagccucaucaacgacaugccgaucaccaacgaccagaagaagcugaugagcaacaacgugcagaucgugcggcagcaguccuacagcaucaugugcaucaucaaggaggagguccuggcguacguggugcagcucccccuguacggcgucaucgacacccccugcuggaagcugcacacgagcccccucugcaccaccaacaccaaggagggguccaacaucugccugacgcgcaccgaccggggcugguacugcgacaacgccggcuccgugagcuucuucccgcaggccgagaccugcaaggugcaguccaaccgcgucuucugcgacaccaugaacagccugacgcuccccuccgaggugaaccugugcaacaucgacaucuucaaccccaaguacgacugcaagaucaugaccagcaagaccgacgucuccagcuccgugaucaccagccugggggccaucguguccugcuacggcaagacgaagugcaccgccagcaacaagugccgggggaucaucaagaccuucuccaacggcugcgacuacgucagcaacaagggcguggacaccguguccgucgggaacacgcucuacuacgugaacaagcaggagggccagagccuguacgugaagggggagcccaucaucaacuucuacgacccgcuggucuuccccagcgacgaguucgacgcguccaucagccaggugaacgagaagaucaaccagucccucgccuucauccgcaagagcgacgagcugcugcacaacgugaacgucggcaaguccaccaccaacaucaugaucaccaccaucaucaucgugaucaucgugauccuccugcugcugaucgccgucggccucuuccuguacugcaaggcccggagcacgcccgugacccuguccaaggaccagcucagcgggaucaacaacaucgccuucuccaacugaggacuagucccuguucccagagcccacuuuuuuuucuuuuuuugaaauaaaauagccugucuuucagaucuaaaaaaaaaaaaaaaaaaaaaaaaaaaaaaaaaaaaaaaaaaaaaaaaaaaaaaaaaaaaaaaaaaaaaaaaaaaaaaaaaaaaaaaaaaaaaaaaaaaa

SEQ ID NO: 21696 - RNA, 1796 nt, Artificial Sequence
  mRNA product Design a-1 (A100) comprising derived and/or modified sequence from HRSV(Memphis-37)__AIY60640.1__F-del_DSCav1_mut8 (opt1)
aggagagucccgcagucggcguccagcggcucugcuuguucgugugugugucguugcaggccuuauucaagcuuaccauggagcugcccauccucaagaccaacgccaucaccacgauccuggccgcggugacccugugcuucgccagcucccagaacaucaccgaggaguucuaccagagcacgugcuccgccgucagcaagggcuaccucggcgcccugcgcaccgggugguacaccagcgugaucaccaucgagcuguccaacaucaaggagaucaagugcaacggcaccgacgccaaggugaagcucaucaagcaggagcuggacaaguacaagaacgcggucacggaccugcagcuccugaugcagagcaccccggccgccggcuccgggagcgcgaucgccuccggcaucgccgucugcaaggugcugcaccucgagggcgaggugaacaagaucaagaacgcccugcuguccaccaacaaggccgucgugagccucuccggcugcggggugagcguccugaccuucaaggugcuggaccucaagaacuacaucgacaagcagcugcugcccauccugaacaagcagagcugcuccauccccaacaucgagaccgucaucgaguuccagcagaagaacaaccgccuccuggagaucacgcgggaguucagcgugaacgcgggcgugaccacccccgucuccaccuacaugcugacgaacagcgagcuccugucccugaucaacgacaugccgaucaccaacgaccagaagaagcucaugagcaacaacgugcagaucgugcgccagcaguccuacagcaucaugugcaucaucaaggaggagguccuggccuacguggugcagcugccccucuacggggucaucgacacccccugcuggaagcugcacaccagcccccugugcacgaccaacaccaaggagggcuccaacaucugccucacccggacggaccgcgggugguacugcgacaacgccggcagcguguccuucuucccgcaggccgagaccugcaagguccagagcaaccggguguucugcgacaccaugaacucccugacccugcccagcgaggugaaccucugcaacaucgacaucuucaaccccaaguacgacugcaagaucaugacguccaagaccgacgucagcuccagcgugaucaccucccugggcgccaucgugagcugcuacgggaagaccaagugcacggcgagcaacaagugccgcggcaucaucaagaccuucuccaacgggugcgacuacgucagcaacaagggcguggacaccguguccgucggcaacacccuguacuacgugaacaagcaggagggccagagccucuacgugaagggggagcccaucaucaacuucuacgacccgcuggucuuccccuccgacgaguucgacgccagcaucucccaggugaacgagaagaucaaccagagccuggccuucauccggaaguccgacgagcuccugcacaacgugaacgucggcaagagcaccacgaacaucaugaucaccaccaucaucaucgugaucaucgugauccugcugcuccugaucgccgucgggcuguuccucuacugcaaggcccgcugaggacuagucccuguucccagagcccacuuuuuuuucuuuuuuugaaauaaaauagccugucuuucagaucuaaaaaaaaaaaaaaaaaaaaaaaaaaaaaaaaaaaaaaaaaaaaaaaaaaaaaaaaaaaaaaaaaaaaaaaaaaaaaaaaaaaaaaaaaaaaaaaaaaaa

SEQ ID NO: 21697 - RNA, 1796 nt, Artificial Sequence
  mRNA product Design a-1 (A100) comprising derived and/or modified sequence from HRSV(Memphis-37)__AIY60640.1__F-del_DSCav1_mut8 (opt1)
aggagagucccgcagucggcguccagcggcucugcuuguucgugugugugucguugcaggccuuauucaagcuuaccauggagcugcccauccucaagaccaacgccaucaccacgauccuggccgcggugacccugugcuucgccagcucccagaacaucaccgaggaguucuaccagagcacgugcuccgccgucagcaagggcuaccucggggcccugcgcaccggcugguacaccuccgugaucaccaucgagcugagcaacaucaaggagaucaagugcaacgggaccgacgccaaggugaagcucaucaagcaggagcuggacaaguacaagaacgcggucacggaccugcagcuccugaugcaguccaccccggccgccggcagcggguccgccaucgcgagcggcaucgccgugugcaaggugcugcaccucgagggcgaggucaacaagaucaagaacgcccugcuguccaccaacaaggccguggugagccucuccgggugcggcgucagcgugcugaccuucaaggugcuggaccucaagaacuacaucgacaagcagcugcugcccauccucaacaagcaguccugcagcauccccaacaucgagacggucaucgaguuccagcagaagaacaaccggcugcuggagaucacccgcgaguucuccgugaacgccggggugaccacccccgucagcacguacaugcucaccaacuccgagcugcugagccucaucaacgacaugccgaucaccaacgaccagaagaagcugaugagcaacaacgugcagaucgugcggcagcaguccuacagcaucaugugcaucaucaaggaggagguccuggcguacguggugcagcucccccuguacggcgucaucgacacccccugcuggaagcugcacacgagcccccucugcaccaccaacaccaaggagggguccaacaucugccugacgcgcaccgaccggggcugguacugcgacaacgccggcuccgugagcuucuucccgcaggccgagaccugcaaggugcaguccaaccgcgucuucugcgacaccaugaacagccugacgcuccccuccgaggugaaccugugcaacaucgacaucuucaaccccaaguacgacugcaagaucaugaccagcaagaccgacgucuccagcuccgugaucaccagccugggggccaucguguccugcuacggcaagacgaagugcaccgccagcaacaagugccgggggaucaucaagaccuucuccaacggcugcgacuacgucagcaacaagggcguggacaccguguccgucgggaacacgcucuacuacgugaacaagcaggagggccagagccuguacgugaagggggagcccaucaucaacuucuacgacccgcuggucuuccccagcgacgaguucgacgcguccaucagccaggugaacgagaagaucaaccagucccucgccuucauccgcaagagcgacgagcugcugcacaacgugaacgucggcaaguccaccaccaacaucaugaucaccaccaucaucaucgugaucaucgugauccuccugcugcucaucgccgucgggcuguuccuguacugcaaggcccggugaggacuagucccuguucccagagcccacuuuuuuuucuuuuuuugaaauaaaauagccugucuuucagaucuaaaaaaaaaaaaaaaaaaaaaaaaaaaaaaaaaaaaaaaaaaaaaaaaaaaaaaaaaaaaaaaaaaaaaaaaaaaaaaaaaaaaaaaaaaaaaaaaaaaa

SEQ ID NO: 21698 - RNA, 1796 nt, Artificial Sequence
  mRNA product Design a-1 (A100) comprising derived and/or modified sequence from HRSV(Memphis-37)__AIY60640.1__F-del_DSCav1_mut8 (opt1)
aggagagucccgcagucggcguccagcggcucugcuuguucgugugugugucguugcaggccuuauucaagcuuaccauggagcugcccauccucaagaccaacgccaucaccacgauccuggccgcggugacccugugcuucgccagcucccagaacaucaccgaggaguucuaccagagcacgugcuccgccgucagcaagggguaccucggggcccugcgcaccggcugguacaccuccgugaucaccaucgagcugagcaacaucaaggagaucaagugcaacgggaccgacgccaaggugaagcucaucaagcaggagcuggacaaguacaagaacgcggucacggaccugcagcuccugaugcaguccaccccggccgccggcagcggguccgccaucgcgagcggcaucgccgugugcaaggugcugcaccucgagggcgaggucaacaagaucaagaacgcccugcuguccaccaacaaggccguggugagccucuccgggugcggcgucagcgugcugaccuucaaggugcuggaccucaagaacuacaucgacaagcagcugcugcccauccucaacaagcaguccugcagcauccccaacaucgagacggucaucgaguuccagcagaagaacaaccggcugcuggagaucacccgcgaguucuccgugaacgccggggugaccacccccgucagcacguacaugcucaccaacuccgagcugcugagccucaucaacgacaugccgaucaccaacgaccagaagaagcugaugagcaacaacgugcagaucgugcggcagcaguccuacagcaucaugugcaucaucaaggaggagguccuggcguacguggugcagcucccccuguacggcgucaucgacacccccugcuggaagcugcacacgagcccccucugcaccaccaacaccaaggagggguccaacaucugccugacgcgcaccgaccggggcugguacugcgacaacgccggcuccgugagcuucuucccgcaggccgagaccugcaaggugcaguccaaccgcgucuucugcgacaccaugaacagccugacgcuccccuccgaggugaaccugugcaacaucgacaucuucaaccccaaguacgacugcaagaucaugaccagcaagaccgacgucuccagcuccgugaucaccagccugggggccaucguguccugcuacggcaagacgaagugcaccgccagcaacaagugccgggggaucaucaagaccuucuccaacggcugcgacuacgucagcaacaagggcguggacaccguguccgucgggaacacgcucuacuacgugaacaagcaggagggccagagccuguacgugaagggggagcccaucaucaacuucuacgacccgcuggucuuccccagcgacgaguucgacgcguccaucagccaggugaacgagaagaucaaccagucccucgccuucauccgcaagagcgacgagcugcugcacaacgugaacgucggcaaguccaccaccaacaucaugaucaccaccaucaucaucgugaucaucgugauccuccugcugcugaucgccgucggccucuuccuguacugcaaggcccggugaggacuagucccuguucccagagcccacuuuuuuuucuuuuuuugaaauaaaauagccugucuuucagaucuaaaaaaaaaaaaaaaaaaaaaaaaaaaaaaaaaaaaaaaaaaaaaaaaaaaaaaaaaaaaaaaaaaaaaaaaaaaaaaaaaaaaaaaaaaaaaaaaaaaa

SEQ ID NO: 21699 - RNA, 1019 nt, Artificial Sequence; identical to SEQ ID NO: 21627
  mRNA product Design a-1 (A100) comprising derived and/or modified sequence from HRSV(Memphis-37)__AIY60638.1__M (opt1)

SEQ ID NO: 21700 - RNA, 1019 nt, Artificial Sequence; identical to SEQ ID NO: 21627
  mRNA product Design a-1 (A100) comprising derived and/or modified sequence from HRSV(Memphis-37)__AIY60638.1__M (opt1)

SEQ ID NO: 21701 - RNA, 1424 nt, Artificial Sequence
  mRNA product Design a-1 (A100) comprising derived and/or modified sequence from HRSV(Memphis-37)__AIY60635.1__N (opt1)
aggagagucccgcagucggcguccagcggcucugcuuguucgugugugugucguugcaggccuuauucaagcuuaccauggcccugagcaaggugaagcucaacgacacccugaacaaggaccagcugcucuccagcuccaaguacaccauccagcgcagcaccggcgacuccaucgacacccccaacuacgacguccagaagcacaucaacaagcugugcgggaugcugcucaucaccgaggacgccaaccacaaguucaccggcgugaucgggaugcuguacgcgaugagccggcugggccgcgaggacacgaucaagauccuccgggacgccggguaccacgugaaggccaacggcgucgacgugaccacccaccgccaggacaucaacggcaaggagaugaaguucgaggugcugacccuggccucccucacgaccgagauccagaucaacaucgagaucgagagccggaaguccuacaagaagaugcugaaggagaugggggaggucgccccggaguaccgccacgacagccccgacugcggcaugaucauccugugcaucgcggcccucgugaucaccaagcuggccgccggggaccgguccggccugaccgcggugauccgccgggccaacaacguccucaagaacgagaugaagcgcuacaaggggcugcugcccaaggacaucgccaacagcuucuacgagguguucgagaaguacccccacuucaucgacguguucguccacuucggcaucgcccaguccagcacgcggggcgggucccgcguggagggcaucuucgccgggcuguucaugaacgcguacggcgccggccaggugaugcugcgguggggcguccuggccaagagcgugaagaacaucaugcucgggcacgccuccgugcaggccgagauggagcaggucguggagguguacgaguacgcgcagaagcucgggggcgaggccggguucuaccacauccugaacaacccgaaggccagccuccugucccugacccaguucccccacuucagcagcgucgugcucggcaacgccgccggccuggggaucaugggcgaguaccgcgggacgccccggaaccaggaccuguacgacgcggccaaggccuacgccgagcagcucaaggagaacggcgugaucaacuacuccguccuggaccugaccgccgaggagcucgaggcgaucaagcaccagcugaaccccaaggacaacgacguggagcugugaggacuagucccuguucccagagcccacuuuuuuuucuuuuuuugaaauaaaauagccugucuuucagaucuaaaaaaaaaaaaaaaaaaaaaaaaaaaaaaaaaaaaaaaaaaaaaaaaaaaaaaaaaaaaaaaaaaaaaaaaaaaaaaaaaaaaaaaaaaaaaaaaaaaa

SEQ ID NO: 21702 - RNA, 1424 nt, Artificial Sequence; identical to SEQ ID NO: 21701
  mRNA product Design a-1 (A100) comprising derived and/or modified sequence from HRSV(Memphis-37)__AIY60635.1__N (opt1)

SEQ ID NO: 21703 - RNA, 974 nt, Artificial Sequence
  mRNA product Design a-1 (A100) comprising derived and/or modified sequence from HRSV(Memphis-37)__AIY60637.1__P (opt1)
aggagagucccgcagucggcguccagcggcucugcuuguucgugugugugucguugcaggccuuauucaagcuuaccauggagaaguucgcccccgaguuccacggcgaggacgccaacaaccgcgcgaccaaguuccuggagagcaucaaggggaaguucaccuccccgaaggaccccaagaagaaggacagcaucaucuccgugaacagcaucgacaucgaggucacgaaggagucccccaucaccagcaacuccaccaucaucaaccccaccaacgagacggacgacaccgccggcaacaagccgaacuaccagcggaagccccucgugagcuucaaggaggaccccacccccuccgacaacccguucagcaagcuguacaaggagaccaucgagacguucgacaacaacgaggaggaguccagcuacuccuacgaggagaucaacgaccagaccaacgacaacaucaccgcccgccuggaccggaucgacgagaagcucagcgagauccuggggaugcugcacacccucguggucgccuccgccggccccacgagcgcgcgcgacgggauccgggacgccauggugggccugcgcgaggagaugaucgagaagauccggaccgaggcccugaugaccaacgaccgccucgaggccauggcgcggcugcgcaacgaggaguccgagaagauggccaaggacaccagcgacgaggugucccugaaccccacgagcgagaagcucaacaaccugcuggagggcaacgacagcgacaacgaccucucccuggaggacuucugaggacuagucccuguucccagagcccacuuuuuuuucuuuuuuugaaauaaaauagccugucuuucagaucuaaaaaaaaaaaaaaaaaaaaaaaaaaaaaaaaaaaaaaaaaaaaaaaaaaaaaaaaaaaaaaaaaaaaaaaaaaaaaaaaaaaaaaaaaaaaaaaaaaaa

SEQ ID NO: 21704 - RNA, 974 nt, Artificial Sequence; identical to SEQ ID NO: 21703
  mRNA product Design a-1 (A100) comprising derived and/or modified sequence from HRSV(Memphis-37)__AIY60637.1__P (opt1)

SEQ ID NO: 21705 - RNA, 833 nt, Artificial Sequence
  mRNA product Design a-1 (A100) comprising derived and/or modified sequence from HRSV(Memphis-37)__AIY60641.1__M2-1 (opt1)
aggagagucccgcagucggcguccagcggcucugcuuguucgugugugugucguugcaggccuuauucaagcuuaccaugagccgccggaaccccugcaaguucgagauccgcggccacugccugaacgggaagcggugccacuucucccacaacuacuucgaguggccgccccacgcccuccuggugcgccagaacuucaugcugaaccggauccucaagagcauggacaaguccaucgacacccugagcgagaucuccggcgccgcggagcuggaccgcaccgaggaguacgcccucggggucgugggcgugcuggagagcuacaucggguccaucaacaacaucacgaagcagagcgccugcgucgccauguccaagcugcucaccgagcugaacagcgacgacaucaagaagcugcgggacaacgaggagcccaacucccccaagauccgcguguacaacaccgugaucagcuacaucgaguccaaccggaagaacaacaagcagaccauccaccuccugaagcgccugccggccgacguccucaagaagacgaucaagaacacccuggacauccacaagagcaucaccaucaacaaccccaaggaguccaccgugaacgacacgaacgaccacgcgaagaacaacgacaccaccugaggacuagucccuguucccagagcccacuuuuuuuucuuuuuuugaaauaaaauagccugucuuucagaucuaaaaaaaaaaaaaaaaaaaaaaaaaaaaaaaaaaaaaaaaaaaaaaaaaaaaaaaaaaaaaaaaaaaaaaaaaaaaaaaaaaaaaaaaaaaaaaaaaaaa

SEQ ID NO: 21706 - RNA, 833 nt, Artificial Sequence; identical to SEQ ID NO: 21705
  mRNA product Design a-1 (A100) comprising derived and/or modified sequence from HRSV(Memphis-37)__AIY60641.1__M2-1 (opt1)
